(19) United States
(12) Patent Application Publication
(10) Pub. No.: US 2010/0143915 A1
(43) Pub. Date: Jun. 10, 2010

(54) Cells Modified or Altered for a Rice-diverged Glycosyltransferase

(75) Inventors: Pamela C. Ronald, Davis, CA (US); Peijian Cao, Davis, CA (US); Laura E. Bartley, Davis, CA (US); Ki-Hong Jung, Yongin (KR)

Correspondence Address: LAWRENCE BERKELEY NATIONAL LABORATORY, Technology Transfer & Intellectual Propery Managem, One Cyolotron Road MS 56A-120, BERKELEY, CA, 94720, US

(73) Assignee: THE REGENTS OF THE UNIVERSITY OF CALIFORNIA, Oakland, CA (US)

(21) Appl. No.: 12/552,155

(22) Filed: Sep. 1, 2009

Related U.S. Application Data
(60) Provisional application No. 61/095,591, filed on Sep. 9, 2008.

(51) Int. Cl. C12Q 1/68; C12N 5/10

(52) U.S. Cl. 435/6; 435/419

(57) ABSTRACT

The present invention provides for a cell comprising a modified or altered enzymatic activity of a rice-diverged glycosyltransferase (GT).

### CROSS-REFERENCE TO RELATED APPLICATIONS

[0001] This application claims priority to U.S. Provisional Patent Application Ser. No. 61/095,591, filed on Sep. 9, 2008, which is hereby incorporated by reference.

### STATEMENT OF GOVERNMENTAL SUPPORT

[0002] The invention described and claimed herein was made in part utilizing funds supplied by the U.S. Department of Energy grant DE-P502-06ER64304 to the Joint BioEnergy Institute. The government has certain rights in this invention.

### FIELD OF THE INVENTION

[0003] This invention relates generally to glycosyltransferases.

### BACKGROUND OF THE INVENTION

[0004] Biofuels have the potential to serve as an alternative energy source, relieving dependence on petroleum and reducing production of climate-changing greenhouse gasses. Sustainable biofuel production will rely on conversion of the large, untapped resource (several billion tons per year) of plant lignocellulosic biomass to sugars for use in fermentation of liquid fuels. Due to its abundance and high rate of production, lignocellulosic biomass has advantages as a biofuel feedstock compared with currently used starch and cane sugar; however, these advantages are overcome by the current expense of extracting sugars from lignocelluose. The source of lignocellulosic biomass is the plant cell wall, a complex and dynamic extracellular matrix that regulates cell growth, provides plants with mechanical support and protects against pathogens (Carpita, 1996). In addition to elucidating fundamental plant biology, understanding the function of genes involved in biosynthesis of plant cell wall constituents may provide avenues that facilitate use of lignocellulose for biofuel production.

[0005] Primary cell walls are composed of cellulose microfibrils embedded in a semi-structured matrix of non-cellulosic polysaccharides (Carpita et al., 2001; Somerville et al., 2004). As plant cells age and cease to grow, secondary cell walls are often deposited, in which the cellulose matrix becomes denser and typically crosslinked by a phenyl propanoid-derived lignin meshwork. There are two major classes of cell walls in plants, type I and type II, which differ in architecture, chemical composition and structures, and their associated biosynthetic processes (Carpita, 1996). Type I walls are found in dicotyledonous plants. In Type I primary walls, cellulose microfibrils are interwoven with xyloglucans and embedded in a matrix of pectin polysaccharides and glycoproteins. As Type I primary walls transition to secondary walls, a xylan polymer, glucuronoxylan accumulates in addition to mannans (Pauly and Keegstra, 2008). Type II walls are characteristic of Commelinoid monocots, including grasses such as rice and switchgrass. In such walls, glucuronoarabinoxylans and β1,3:1,4 mixed linkage glucan form the meshwork surrounding cellulose microfibrils. Though present, Type II walls possess a lower abundance of pectin polysaccharides, xyloglucan and structural proteins relative to Type I walls.

[0006] Glycosyltransferases (GTs; EC 2.4.x.y), which add sugar molecules onto acceptor molecules, are responsible for the synthesis of the branched and linear polysaccharides of both type I and II cell walls, among many other functions in biology, including signaling and metabolism (Coutinho et al., 2003). GTs have been hierarchically classified based on the following criteria: three-dimensional structure, catalytic reaction mechanism, and the their donor and acceptor substrates (Coutinho et al., 2003). At the tertiary structure level, GTs adopt one of the following two major folds: the GT-A (SpsA and SpsA-like) fold or the GT-B (B-GT and B-GT-like) fold (Bourne and Henrissat, 2001; Hu and Walker, 2002; Wimmerova et al., 2003). Recently a new GT fold, GT-C, was identified in the Pyrococcus furiosus Oligosaccharyltransferase (OST) (Igura et al., 2008). The fold class of a large number of GTs has not yet been determined and these are classified as “GT-U” for unknown fold. At the catalytic reaction level, glycosylation proceeds via two reaction mechanisms, inversion or retention of stereochemistry at the Cl position of the donor sugar. Beyond these general criteria, GTs have been traditionally grouped into families based on their activated sugar substrate (e.g., galactosyltransferases, sialyltransferases, etc.) and in many cases the acceptor group (e.g., protein, lipid, glycogen, etc.). However, sequence data has far outpaced our ability to identify biochemical activity of enzymes. This led the creation of the Carbohydrate-Active enZymes (CAZy; http://www.cazy.org/) database to build on the biochemical data by developing a hierarchical family classification scheme for grouping GTs at the primary sequence level (Campbell et al., 1997; Coutinho et al., 2003). As of February 2008, CAZy contained 33,359 GTs from organisms across all the kingdoms of life classified into 90 different GT families primarily based on amino acid sequence similarity.

[0007] While much remains to be learned, the last decade has seen a great expansion in our understanding of the GTs that synthesize the major constituents of Type I primary walls. Use of diverse plant species and the reference dicot, Arabidopsis (Arabidopsis thaliana), has led to the identification of many genes involved in synthesis of xyloglucan, mannan, and pectins (reviewed in (Farrokhi et al., 2006). In contrast, our depth of knowledge regarding synthesis of type II wall enriched polysaccharide components has lagged behind. The Cellulose synthase-like F (CslF) gene family has been shown to have a role in synthesis of mixed linkage glucan (Burton et al., 2006), but the synthesis of glucuronoarabinoxylan in grasses remains obscure. Progress may be possible based on emerging studies of glucuronoxylan in Arabidopsis secondary cell walls (Lee et al., 2007a; Lee et al., 2007b; Pena et al., 2007; York and O′Neill, 2008). However, the surprisingly complex view that those studies provide remains to be tested for grass primary cell walls.

[0008] There is now an opportunity to apply the genomic resources that have accumulated for grasses toward understanding the synthesis of Type II cell walls. Rice serves as a reference monocot species because of its small, sequenced genome (−389 Mb) and the availability of genetic and molecular resources, including indexed insertion mutants (IRGSP, 2005; Jung et al., 2008). Rice itself is also a potentially attractive biofuel feedstock source because it comprises a large portion (ca. 50%) of the world's agricultural residue. Due to a high level of genomic colinearity among grass species (Devos and Gale, 2000), information learned regarding rice cell walls is likely to apply to the cell walls of the other major cereal crops, maize (Zea mays) and wheat (Triticum aestivum), and potential dedicated energy crops, such as switchgrass (Panicum virgatum) and Miscanthus. Conversely, extensive cell wall biochemical and physiological studies on maize, wheat, and barley (Hordeum vulgare), are also likely to apply to rice.

[0009] One of the challenges to discovery of cell wall gene function in Arabidopsis has been genetic redundancy, such that single gene mutants have no measurable phenotype. For example, Richardson and Somerville reported that a number of single Cs1 gene mutants provide no phenotype (Richmond and Somerville, 2001). This challenge is likely to be exacerbated in grasses, which possess a larger gene complement compared with Arabidopsis. Estimates for the percent of the rice genome that consists of segmental duplication vary from 27 to 66%, depending on the method of detection used; however, consensus leans towards a higher value of ±50% (Ouyang et al., 2007; Yu et al., 2005). Thus, the rice genome encodes a large number of genes with redundant functions, creating a considerable challenge to the functional analysis of individual genes (Jung et al., 2008a; Jung et al., 2008b). This is also the case for GTs, for which we anticipate that the large number of members in some families, especially those associated with cell wall synthesis, will create difficulties in the functional analysis. Incorporating diverse systems biological datasets, including bioinformatic, genomic, gene expression, and proteomic data, can help inform rationale strategies for gene function discovery, even in large gene families. However, these approaches are hampered by current database formats that display only a single gene or field at a time, preventing simultaneous comparisons of multiple data sets and multi-gene families (Jung et al., 2008a, Jung et al., 2008b). Scattering of genomic data across multiple databases, exacerbated by different gene nomenclatures and data formats, creates additional challenges to integration. The field of phylogenomics, which merges phylogenetics and genomics and puts genomic data in a phylogenetic context, helps us to resolve these limitations. A successful application of phylogenomics for a family of genes for which redundancy poses enormous challenges is the Rice Kinase Database (http://rkd.ucdavis.edu/), which provides a template for the design of new phylogenomic databases (Dardick et al., 2007).

[0010] Toward identifying the functions of GTs in building the walls of diverse cell types throughout development, genomic and transcriptomics analyses of glycosyltransferase genes have been conducted for two dicot species, Arabidopsis and poplar (Populus trichocarpa) (Geisler-Lee et al., 2006; Henrissat et al., 2001). The Carbohydrate Active EnZymes (CAZy) database contains only GT family classification and sequence information for the rice enzymes and GTs from the other species it hosts. Yokoyama and Nishitani compared the numbers and phylogenetic relationships of known cell wall-related genes between rice and Arabidopsis soon after the publication of the rice genome (Yokoyama and Nishitani, 2004). However, that analysis focused only on genes, including six GT families, known at that time to be involved in cell wall synthesis and did not include other analyses. Mitchell et al. conducted a much more extensive comparison between grass and dicot GTs and other gene families (Mitchell et al., 2007). This effort examined expressed sequence tag (EST) abundance for orthologous gene groups from Arabidopsis and rice, leading to the identification of several gene families that are more abundantly expressed in grasses than dicots. These genes, including members of the GT47 and GT61 families, are good candidates for involvement in synthesis of glucuronoarabinoxylan and other type II wall-specific or enriched components (Mitchell et al., 2007).

### SUMMARY OF THE INVENTION

[0011] The present invention provides for a cell comprising a modified or altered enzymatic activity of a rice-diverged glycosyltransferase (GT). The rice-diverged GT of the present invention have an expression level at equal to higher than the expression level observed for the rice-diverged GT identified in Table 3. The rice-diverged GT have a high expression in vegetative above ground plant tissue. The enzymatic activity of the rice-diverged GT can be modified or altered in that the expression of the GT is modified or altered, or the GT has a modified or altered amino acid sequence as compared to the wild-type GT such that the enzymatic activity of the GT is modified, altered, or a combination thereof. In some embodiments of the invention, the cell is a plant cell.

[0012] The present invention also provides for a seed, plant tissue, plant part or a whole plant comprising a cell of the present invention. In some embodiments, the plant part is a leaf, leaf stalk, stem, root, or a combination thereof. In some embodiments, the whole plant includes, but is not limited to, a germinating seed.

[0013] The present invention also provides for a method of identifying or determining a rice-diverged GT of a plant or cell, comprising: the steps described herein in Example 1 of this present specification.

[0014] The present invention also provides for a method of identifying or determining a rice-diverged GT of a plant or cell, comprising: (a) providing the amino acid sequence of a monocot gene not known to be rice-diverged GT, and (b) identifying the gene as lacking a dicot ortholog. The method can further comprise: determining the expression level of the gene in vegetative above ground plant tissue. The method can further comprise: constructing a plant cell that is reduced or increased in the expression of the gene.

[0015] The present invention also provides for a method of constructing a cell of the present invention, comprising: modifying or altering the enzymatic activity of the rice-diverged GT.

[0016] The present invention also provides for a method of constructing a seed, plant tissue, plant part or a whole plant comprising a cell of the present invention, comprising: constructing a cell of the present invention.

### BRIEF DESCRIPTION OF THE DRAWINGS

[0017] The foregoing aspects and others will be readily appreciated by the skilled artisan from the following description of illustrative embodiments when read in conjunction with the accompanying drawings.

[0018] FIG. 1 shows a screen shot of the Rice GT Database Tree viewer format. Checking each box and clicking the Submit button will display the selected data next to the phylogenetic tree.

[0019] FIG. 2 shows a screen shot of the topmost portion of the Rice GT Database phylogenetic tree. A subset of database content, including the TIGR gene model ID, CAZy family, corresponding RAP2 ID and a hyperlink to NCBI BLAST search are listed in spreadsheet format adjacent to the tree. This format allows for easy and flexible visualization of the data within the context of the tree. Data obtained in the spreadsheet can be searched using the browser search function.

[0020] FIG. 3 shows a screen shot of a Rice GT Database summary page Links to summary pages are provided from the TIGR model ID of each GT. Summary pages include all data in the database except the microarray data because of large amount of data. The Digital Northern data and MPSS expression data are represented in histogram format for easy comparison of rice GT expression patterns between different tissues.

[0021] FIG. 4 shows the hierarchical classification of rice GT families based on GT fold, reaction mechanism and known enzymatic activities. GT-A, GT-B, and GT-C, are the known GT folds. GT-U indicates that the GT fold is unknown. In each GT family, only one known enzymatic activity is shown on this figure for convenience.

[0022] FIG. 5 shows the distribution of rice, Arabidopsis and poplar GT gene models among different GT families. Number of GT gene models in each species is shown on the y-axis. GT families are listed along the x-axis.

[0023] FIG. 6 shows the distribution of GT gene models among different MPSS libraries and expression levels. Number of GT gene models in each tissue is shown on the y-axis. Tissues are listed along the x-axis and different expression levels are represented by different colors.

[0024] FIG. 7 shows the Affymetrix rice microarray expression profiles of rice (A) GT47 and (B) GT61 family members in different tissues/organs and during different developmental stages. The average log₂ signal values of rice GTs in various tissues/organs and developmental stages (listed at the top of heatmap) are presented with the same gene order in the phylogenetic tree. The color scale (representing log₂ signal values) is shown at the top.

### DETAILED DESCRIPTION

[0025] Before the present invention is described, it is to be understood that this invention is not limited to particular embodiments described, as such may, of course, vary. It is also to be understood that the terminology used herein is for the purpose of describing particular embodiments only, and is not intended to be limiting, since the scope of the present invention will be limited only by the appended claims.

[0026] Where a range of values is provided, it is understood that each intervening value, to the tenth of the unit of the lower limit unless the context clearly dictates otherwise, between the upper and lower limits of that range is also specifically disclosed. Each smaller range between any stated value or intervening value in a stated range and any other stated or intervening value in that stated range is encompassed within the invention. The upper and lower limits of these smaller ranges may independently be included or excluded in the range, and each range where either, neither or both limits are included in the smaller ranges is also encompassed within the invention, subject to any specifically excluded limit in the stated range. Where the stated range includes one or both of the limits, ranges excluding either or both of those included limits are also included in the invention.

[0027] Unless defined otherwise, all technical and scientific terms used herein have the same meaning as commonly understood by one of ordinary skill in the art to which this invention belongs. Although any methods and materials similar or equivalent to those described herein can be used in the practice or testing of the present invention, the preferred methods and materials are now described. All publications mentioned herein are incorporated herein by reference to disclose and describe the methods and/or materials in connection with which the publications are cited.

[0028] It must be noted that as used herein and in the appended claims, the singular forms “a”, “and”, and “the” include plural referents unless the context clearly dictates otherwise. Thus, for example, reference to “a GT” includes a plurality of such GTs, and so forth.

[0029] In this specification and in the claims that follow, reference will be made to a number of terms that shall be defined to have the following meanings:

[0030] In describing the present invention, the term “GT” encompasses rice-diverged GT.

[0031] The terms “expression vector” or “vector” refer to a compound and/or composition that can be introduced into a cell by any suitable method, including but not limited to transduction, transformation, transfection, infection, electroporation, conjugation, and the like; thereby causing the cell to express nucleic acids and/or proteins other than those native to the cell, or in a manner not native to the cell. An “expression vector” contains a sequence of nucleic acids (ordinarily RNA or DNA) to be expressed by the host cell. Optionally, the expression vector also comprises materials to aid in achieving entry of the nucleic acid into the cell, such as a virus, liposome, protein coating, or the like. The expression vectors contemplated for use in the present invention include those into which a nucleic acid sequence can be inserted, along with any preferred or required operational elements. Further, the expression vector must be one that can be transferred into a cell and replicated therein. Such expression vectors include plasmids, particularly those with restriction sites that have been well documented and that contain the operational elements preferred or required for transcription of the nucleic acid sequence. Such plasmids, as well as other expression vectors, are well known to those of ordinary skill in the art.

[0032] The term “operably linked” refers to a functional linkage between a nucleic acid expression control sequence (such as a promoter) and a second nucleic acid sequence, wherein the expression control sequence directs transcription of the nucleic acid corresponding to the second sequence.

[0033] The term “recombinant” refers to a cell or vector, that has been modified by the introduction of a heterologous nucleic acid sequence or that the cell is derived from a cell so modified. Thus, for example, recombinant cells express genes that are not found in identical form within the native (non-recombinant) form of the cell or express native genes that are otherwise abnormally expressed, under expressed or not expressed at all as a result of deliberate human intervention.

[0034] The term “sequence similarity” refers to the level of nucleic acid or amino acid sequence identity between two or more aligned sequences, when aligned using a sequence alignment program. For example, 70% sequence similarity means the same thing as 70% sequence identity determined by a defined algorithm. Exemplary computer programs which can be used to determine identity between two sequences include, but are not limited to, the suite of BLAST programs, e.g., BLASTN, BLASTX, and TBLASTX, BLASTP and TBLASTN, publicly available on the Internet at (ncbi.nlm.gov/BLAST/). See, also, Altschul, S. F. et al., 1990 and Altschul, S. F. et al., 1997.

[0035] The term “transgenic plant” refers to a plant that has incorporated exogenous nucleic acid sequences, i.e., nucleic acid sequences which are not present in the native (“untransformed”) plant or plant cell. Thus a plant having within its cells a heterologous polynucleotide is referred to herein as a “transgenic plant”. The heterologous polynucleotide can be either stably integrated into the genome, or can be extra-chromosomal. Typically, the polynucleotide of the present invention is stably integrated into the genome such that the polynucleotide is passed on to successive generations. The term “transgenic” as used herein does not encompass the alteration of the genome (chromosomal or extra-chromosomal) by conventional plant breeding methods or by naturally occurring events such as random cross-fertilization, non-recombinant viral infection, non-recombinant bacterial transformation, non-recombinant transposition, or spontaneous mutation. “Transgenic” is used herein to include any cell, cell line, callus, tissue, plant part or plant, the genotype of which has been altered by the presence of heterologous nucleic acids including those transgenics initially so altered as well as those created by sexual crosses or asexual reproduction of the initial transgenics.

[0036] The term “expression” with respect to a protein or peptide, such as a GT, refers to the process by which the protein or peptide is produced based on the nucleic acid sequence of a gene. The process includes both transcription and translation. The term “expression” may also be used with respect to the generation of RNA from a DNA sequence.

[0037] The term “plant cell” refers to any cell derived from a plant, including undifferentiated tissue (e.g., callus) as well as plant seeds, pollen, progagules and embryos.

[0038] The term “mature plant” refers to a fully differentiated plant.

[0039] The terms “native” and “wild-type” relative to a given plant trait or phenotype refers to the form in which that trait or phenotype is found in the same variety of plant in nature.

[0040] The term “plant” includes reference to whole plants, plant organs (for example, leaves, stems, roots, etc.), seeds, and plant cells and progeny of same. Plant cell, as used herein includes, without limitation, seeds, suspension cultures, embryos, meristematic regions, callus tissue, leaves roots shoots, gametophytes, sporophytes, pollen, and microspores. The class of plants that can be used in the methods of the present invention is generally as broad as the class of higher plants amenable to transformation techniques, including both monocotyledonous and dicotyledonous plants.

[0041] The term “seed” is meant to encompass all seed components, including, for example, the coleoptile and leaves, radicle and coleorhiza, scutulum, starchy endosperm, aleurone layer, pericarp and/or testa, either during seed maturation and seed germination.

[0042] The term “promoter” is a promoter capable of initiating (promoting) transcription in cells, wherein if the cell is a plant cell, then the promoter is a plant promoter. Such promoters need not be of plant origin. For example, promoters derived from plant viruses, such as the CaMV 35S promoter, or from Agrobacterium tumefaciens such as the T-DNA promoters, can serve as plant promoters. An example of a plant promoter of plant origin is the maize ubiquitin-1 (ubi-1) promoter. Other suitable plant promoters include those known to persons of ordinary skill in the art. A plant promoter can direct expression of a nucleotide sequence in all or certain tissues of a plant, e.g., a constitutive promoter such as 35S or a broadly expressing promoter such as p326. Alternatively, a plant promoter can direct transcription of a nucleotide sequence in a specific tissue (tissue-specific promoters) or can be otherwise under more precise environmental control (inducible promoters).

[0043] The term “inducible promoter” refers to a promoter that is regulated by particular conditions, such as light, anaerobic conditions, temperature, chemical concentration, protein concentration, conditions in an organism, cell, or organelle. Stress-inducible promoters, for example, can be activated under conditions of stress, such as drought, high or low temperature, lack of appropriate nutrients. One example of an inducible promoter that can be utilized with the polynucleotides provided herein is PARSK1. This promoter is from an Arabidopsis gene encoding a serine-threonine kinase enzyme, and is induced by dehydration, ABA, and sodium chloride (Wang and Goodman (1995) Plant J. 8:37). Other examples of stress-inducible promoters include PT0633 and PT0688. These promoters may be inducible under conditions of drought.

[0044] These and other objects, advantages, and features of the invention will become apparent to those persons skilled in the art upon reading the details of the invention as more fully described below.

[0045] The present invention provides for a cell comprising a modified or altered enzymatic activity of a rice-diverged glycosyltransferase (GT). The rice-diverged GT of the present invention have an expression level at equal to higher than the expression level observed for the rice-diverged GT identified in Table 3. The rice-diverged GT have a high expression in vegetative above ground plant tissue. The enzymatic activity of the rice-diverged GT can be modified or altered in that the expression of the GT is modified or altered, or the GT has a modified or altered amino acid sequence as compared to the wild-type GT such that the enzymatic activity of the GT is modified, altered, or a combination thereof. In some embodiments of the invention, the cell is a plant cell.

[0046] The rice-diverged GT is a GT identified by the method taught in Example 1 of the present specification. The rice-diverged GT can also be a sole GT gene expressed in a plant or the GT that is most rice-diverged among all redundant GT genes in a plant. Such rice-diverged GT include, but is not limited to, the 33 GT genes described herein, such as Table 3. Such rice-diverged GT include the GT having an amino acid sequence comprising an amino acid sequence, or at least 70% amino acid sequence similarity to, chosen from SEQ ID NO:1-30, wherein the GT has a GT enzymatic activity. In some embodiments, the amino acid sequence similarity is at least 80%. In some embodiments, the amino acid sequence similarity is at least 90%. In some embodiments, the amino acid sequence similarity is at least 95%. In some embodiments, the amino acid sequence similarity is at least 99%.

[0047] In some embodiments, the GT is rice-diverged in above-ground vegetative tissues. In some embodiments, the GT is involved in directly or indirectly in cellulose or cell wall synthesis, including but not limited to synthesis of a type I or a type II wall-specific or enriched component, including but not limited to glucuronoarabinoxylan.

[0048] The following amino acid sequences (SEQ ID NOs:1-269) depict amino acids of identified known rice-diverged GTs. The amino acid sequences SEQ ID NOs:1-30 depict amino acids of identified known rice-diverged GTs that have a high expression in vegetative above ground plant tissue.

Amino acid sequence of LOC_Os02g28900.1|12002.m08034
(SEQ ID NO: 1)
MPTASPAHAVFFPYPVQGHVASALHLAKLLHARGGVRVTFVHSERNRRRVIRSHGEGALA
AGAPGFCFAAVPDGLPSDDDDDGPSDPRDLLFSIGACVPHLKKILDEAAASGAPATCVVS
DVDHVLLAAREMGLPAVAFWTTSACGLMAFLQCKELIDRGIIPLKDAEKLSNGYLDSTVV
DWVPGMPADMRLRDFFSFVRTTDTDDPVLAFVVSTMECLRTATSAVILNTFDALEGEVVA
AMSRILPPIYTVGPLPQLTAASHVVASGADPPDTPALSAASLCPEDGGCLEWLGRKRPCS
VLYVNFGSIVYLTSTQLVELAWGLADSGHDFLWVIRDDQAKVTGGDGPTGVLPAEFVEKT
KGKGYLTSWCPQEAVLRHDAIGAFLTHCGWNSVLEGISNGVPMLCYPMAADQQTNCRYAC
TEWRVGVEVGDDIEREEVARMVREVMEEEIKGKEVRQRATEWKERAAMAVVPSGTSWVNL
DRMVNEVFSPGNNM*
Amino acid sequence of LOC_Os04g25440.1|12004.m07672
(SEQ ID NO: 2)
MGSLPAAAEARPHAVMVPYPAQGHVTPMLTLAKLLYSRGFHVTFVNNEFNHRRLLRARGA
RALDGAPGFRFAAMDDGLPPSDADATQDVPALCHSVRTTWLPRFMSLLAKLDDEAAAAAA
ADGAARRVTCVVADSNMAFGIHAARELGLRCATLWTASACGFMGYYHYKHLLDRGLFPLK
SEADLSNGHLDTTVDWIPGMTGDLRLRDLPSFVRSTDRDDIMFNFFVHVTASMSLAEAVI
INTFDELDAPSSPLMGAMAALLPPIYTVGPLHLAARSNVPADSPVAGVGSNLWKEQGEAL
RWLDGRPPRSVVYVNFGSITVMSAEHLAEFAWGLAGSGYAFLWNLRPDLVKGDGGAAPAL
PPEFAAATRERSMLTTWCPQAEVLEHEAVGVFLTHSGWNSTLESIAGGVPMVCWPFFAEQ
QTNCRYKRTEWGIGAEIPDDVRRGEVEALIREAMDGEKGREMRRRVAELRESAVAAAKPG
GRSVHNIDRLIDEVLMA*
Amino acid sequence of LOC_Os11g04860.1|12011.m04684
(SEQ ID NO: 3)
MANAANQHTCDGPQPSAPTHFLIVAYGIQSHINPAQNLAHRLASIDASSVMCTLSIHASA
HRRMFSSLIASPDEETTDGIISYVPFSDGFDDISKLSILSGDERARSRCTSFESLSAIVS
QLAARGRPVTCIVCTMAMPPVLDVARKNGIPLVVFWNQPATVLAAYYHYYHGYRELFASH
ASDPSYEVVLPGMQPLCIRSLPSFLVDVTNDKLSSFVVEGFQELFEFMDREKPKVLVNTL
NVLEAATLTAVQPYFQEVFTIGHLVAGSAKERIHMFQRDKKNYMEWLDTHSERSVVYISF
GSILTYSKRQVDEILHGMQECEWPFLWVVRKDGREEDLSYLVDNIDDHHNGMVIEWCDQL
DVLSHPSVGCFVTQCGWNSTLEALELGVPMVAVPNWSDQPTIAYLVEKEWMVGTRVYRND
EGVIVGTELAKSVKIVMGDNEVATKIRERVNSFKHKIHEEAIRGETGQRSLQIFAKTIIE
SD*
Amino acid sequence of LOC_Os02g49332.1|12002.m33282
(SEQ ID NO: 4)
MAGSGGGVVSGGRQRGPPLFATEKPGRMAMAAYRVSAATVFAGVLLIWLYRATHLPPGGG
DGVRRWAWLGMLAAELWFGFYWVLTLSVRWCPVYRRTFKDRLAQSYSEDELPSVDIFVCT
ADPTAEPPMLVISTVLSVMAYDYLPEKLNIYLSDDAGSVLTFYVLCEASEFAKHWIPFCK
KYKVEPRSPAAYFAKVASPPDGCGPKEWFTMKELYKDMTDRVNSVVNSGRIPEVPRCHSR
GFSQWNENFTSSDHPSIVQILIDSNKQKAVDIDGNALPTLVYMAREKKPQKQHHFKAGSL
NALIRVSSVISNSPIIMNVDCDMYSNNSESIRDALCFFLDEEQGQDIGFVQYPQNFENVV
HNDIYGHPINVVNELDHPCLDGWGGMCYYGTGCFHRREALCGRIYSQEYKEDWTRVAGRT
EDANELEEMGRSLVTCTYEHNTIWGIEKGVRYGCPLEDVTTGLQIQCRGWRSVYYNPKRK
GFLGMTPTSLGQILVLYKRWTEGFLQISLSRYSPFLLGHGKIKLGLQMGYSVCGFWAVNS
FPTLYYVTIPSLCFLNGISLFPEKTSPWFIPFAYVMVAAYSCSLAESLQCGDSAVEWWNA
QRMWLIRRITSYLLATIDTFRRILGISESGFNLTVKVTDLQALERYKKGMMEFGSFSAMF
VILTTVALLNLACMVLGISRVLLQEGPGGLETLFLQAVLCVLIVAINSPVYEALFLRRDK
GSLPASVARVSICFVLPLCILSICK*
Amino acid sequence of LOC_Os07g36630.1|12007.m07914
(SEQ ID NO: 5)
MAANGGGGGAGGCSNGGGGGAVNGAAANGGGGGGGGSKGATTRRAKVSPMDRYWVPTDEK
EMAAAVADGGEDGRRPLLFRTFTVRGILLHPYRLLTLVRLVAIVLFFIWRIRHPYADGMF
FWWISVIGDFWFGVSWLLNQVAKLKPIRRVPDLNLLQQQFDLPDGNSNLPGLDVFINTVD
PINEPMIYTMNAILSILAADYPVDKHACYLSDDGGSIIHYDGLLETAKFAALWVPFCRKH
SIEPRAPESYFAVKSRPYAGSAPEDFLSDHRYMRREYDEFKVRLDALFTVIPKRSDAYNQ
AHAEEGVKATWMADGTEWPGTWIDPSENHKKGNHAGIVQVMLNHPSNQPQLGLPASTDSP
VDFSNVDVRLPMLVYIAREKRPGYDHQKKAGAMNVQLRVSALLTNAPFIINFDGDHYVNN
SKAFRAGICFMLDRREGDNTAFVQFPQRFDDVDPTDRYCNHNRVFFDATLLGLNGIQGPS
YVGTGCMFRRVALYGVDPPRWRPDDGNIVDSSKKFGNLDSFISSIPIAANQERSIISPPA
LEESILQELSDAMACAYEDGTDWGKDVGWVYNIATEDVVTGFRLHRTGWRSMYCRMEPDA
FRGTAPINLTERLYQILRWSGGSLEMFFSHNCPLLAGRRLNFMQRIAYINMTGYPVTSVF
LLFYLLFPVIWIFRGIFYIQKPFPTYVLYLVIVIFMSEMIGMVEIKWAGLTLLDWIRNEQ
FYIIGATAVYPLAVLHIVLKCFGLKGVSFKLTAKQVASSTSEKFAELYDVQWAPLLFPTI
VVIAVNICAIGAAIGKALFGGWSLMQMGDASLGLVFNVWILLLIYPFALGIMGRWSKRPY
ILFVLIVISFVIIALADIAIQAMRSGSVRLHFRRSGGANFPTSWGF*
Amino acid sequence of LOC_Os08g06380.1|12008.m04777
(SEQ ID NO: 6)
MAPAVAGGGGRRNNEGVNGNAAAPACVCGFPVCACAGAAAVASAASSADMDIVAAGQIGA
VNDESWVAVDLSDSDDAPAAGDVQGALDDRPVFRTEKIKGVLLHPYRVLIFVRLIAFTLF
VIWRIEHKNPDAMWLWVTSIAGEFWFGFSWLLDQLPKLNPINRVPDLAVLRRRFDHADGT
SSLPGLDIFVTTADPIKEPILSTANSILSILAADYPVDRNTCYLSDDSGMLLTYEAMAEA
AKFATLWVPFCRKHAIEPRGPESYFELKSHPYMGRAQEEFVNDRRRVRKEYDDFKARING
LEHDIKQRSDSYNAAAGVKDGEPRATWMADGSQWEGTWIEQSENHRKGDHAGIVLVLLNH
PSHARQLGPPASADNPLDFSGVDVRLPMLVYVAREKRPGCNHQKKAGAMNALTRASAVLS
NSPFILNLDCDHYINNSQALRAGICFMLGRDSDTVAFVQFPQRFEGVDPTDLYANHNRIF
FDGTLRALDGLQGPIYVGTGCLFRRITLYGFEPPRINVGGPCFPRLGGMFAKNRYQKPGF
EMTKPGAKPVAPPPAATVAKGKHGFLPMPKKAYGKSDAFADTIPRASHPSPYAAEAAVAA
DEAAIAEAVMVTAAAYEKKTGWGSDIGWVYGTVTEDVVTGYRMHIKGWRSRYCSIYPHAF
IGTAPINLTERLFQVLRWSTGSLEIFFSRNNPLFGSTFLHPLQRVAYINITTYPFTALFL
IFYTTVPALSFVTGHFIVQRPTTMFYVYLAIVLGTLLILAVLEVKWAGVTVFEWFRNGQF
WMTASCSAYLAAVLQVVTKVVFRRDISFKLTSKLPAGDEKKDPYADLYVVRWTWLMITPI
IIILVNIIGSAVAFAKVLDGEWTHWLKVAGGVFFNFWVLFHLYPFAKGILGKHGKTPVVV
LVWWAFTFVITAVLYINIPHIHGPGRHGAASPSHGHHSAHGTKKYDFTYAWP*
Amino acid sequence of LOC_Os02g51060.1|12002.m10140
(SEQ ID NO: 7)
MQGDLALRAGGDRLLVADTVAAVVESLVQAWRQVRMELLVPLLRGAVVACMVMSVIVLAE
KVFLGVVSAVVKLLRRRPARLYRCDPVVVEDDDEAGRASFPMVLVQIPMYNEKEVYQLSI
GAACRLTWPADRLIVQVLDDSTDAIVKELVRKECERWGKKGINVKYETRKDRAGYKAGNL
REGMRRGYVQGCEFVAMLDADFQPPPDFLLKTVPFLVHNPRLALVQTRWEFVNANDCLLT
RMQEMSMDYHFKVEQEAGSSLCNFFGYNGTAGVWRRQVIDESGGWEDRTTAEDMDLALRA
GLLGWEFVYVGSIKVKSELPSTLKAYRSQQHRWSCGPALLFKKMFWEILAAKKVSFWKKL
YMTYDFFIARRIISTFFTFFFFSVLLPMKVFFPEVQIPLWELILIPTAIILLHSVGTPRS
IHLIILWFLFENVMALHRLKATLIGFFEAGRANEWIVTQKLGNIQKLKSIVRVTKNCRFK
DRFHCLELFIGGFLLTSACYDYLYRDDIFYIFLLSQSIIYFAIGFEFMGVSVSS*
Amino acid sequence of LOC_Os03g15840.1|12003.m07021
(SEQ ID NO: 8)
MGQQAAEAQPLLLQGDQVDAEWGCRPHRIVLFVEPSPFAYISGYKNRFQNFIKHLREMGD
EMLVVTTHKGAPEEFHGAKVIGSWSFPCPLYQNVPLSLALSPRIFSAVAKFKPDIIHATS
PGVMVFGARFIAKMLSVPMVMSYHTHLPAYIPRYNLNWLLGPTWSLIRCLHRSADLTLVP
SVAIAEDFETAKVVSANRVRLWNKGVDSESFHPKFRKHEMRIKLSGGEPEKPLIIHVGRF
GREKNLDFLKRVMERLPGVRIAFVGDGPYRAELERMFTGMPAVFTGMLQGEELSQAYASG
DLFAMPSESETLGQVVLESMASGVPVVAARAGGIPDIIPKDKEGKTSFLFTPGDLDECVR
KIEQLLSSKVLRESIGRAAREEMEKCDWRAASKTIRNEHYCTATLYWRKKMGRTN*
Amino acid sequence of LOC_Os03g16140.1|12003.m07051
(SEQ ID NO: 9)
MARKQHIAIFTTASLPWMTGTAVNPLFRAAYLAKAGDWEVTLVVPWLSKGDQLLVYPNKM
KFSVPGEQEGYVRRWLEERIGLLPKFEIKFYPGKFSTEKRSILPAGDITQTVSDDKADIA
VLEEPEHLTWYHHGRRWKNKFRKVIGVVHTNYLEYVKRERNGYIHAFLLKHINSWVTDIY
CHKVIRLSAATQEVPRSIVCNVHGVNPKFIEIGKLKHQQISQREQAFFKGAYYIGKMVWS
KGYTELLQLLQKHQKELSGLKMELYGSGEDSDEVKASAEKLNLDVRVYPGRDHGDSIFHD
YKVFINPSTTDVVCTTTAEALAMGKIVICANHPSNEFFKRFPNCHMYNTEKEFVRLTMKA
LAEEPIPLSEELRHELSWEAATERFVRVADIAPIMSIKQHSPSPQYFMYISPDELKKNME
EASAFFHNAISGFETARCVFGAIPNTLQPDEQQCKELGWRLQE*
Amino acid sequence of LOC_Os11g05990.1|12011.m04795
(SEQ ID NO: 10)
MASYGVDTRPAAAAAGGGGAGAGAAGEGALSFLSRGLREDLRLIRARAGELETFLTAPVP
EPELLARLRRAYSSSAGTTRLDLSAIGKAFGTGVVGRGSRGARWGWEEVQEAEEWEPIRM
VKARLREMERRRQWQATDMLHKVKLSLKSMSFVPEASEEVPPLDLGELLAYFLKQSGPLF
DQLGIKRDVCDKLVESLCSKRKDHLAYNSFPASEPSAFSNDNAGDELDLRIASVVQSTGH
NYEGGFWNDGHKYETADKRHVAIVTTASLPWMTGTAVNPLFRAAYLAKSSKQDVTLVVPW
LCKSDQELVYPNSMTFSSPQEQEAYMRSWLEERVGFKTDFKISFYPGKFQKERRSIIPAG
DTSQFIPSKEADIAILEEPEHLNWYHHGKRWTDKFNHVVGVVHTNYLEYIKREKNGVIQA
FFVKHINNLVARAYCHKVLRLSGATQDLPKSMICNVHGVNPKFLEVGERIAAERESGQHS
FSKGAYFLGKMVWAKGYRELIDLYAKHKSDLEGIKLDIYGNGEDSHEVQSAAMKLNLNLN
FHKGRDHADDSLHGYKVFINPSISDVLCTATAEALAMGKFVVCADHPSNDFFRSFPNCLT
YKTSEDFVAKVKEAMARDPQPLTPEQRYNLSWEAATQRFMEHSELDKVLSSSNRDCTTST
SGCGKSGDNKMEKSASLPNMSDMVDGGLAFAHYCFTGNELLRLSTGAIPGTLNYNKQHSL
DLHLLPPQVQNPVYGW*
Amino acid sequence of LOC_Os03g11330.1|12003.m06584
(SEQ ID NO: 11)
MQLRISPSMRSITISSSNGVVDSMKVRVAPQPPPPPPPLALQGVVTPGAGRRGGGGGGGG
GGGGWWGAGWYWRAVAFPAVVALGCLLPFAFILAAVPALEADGSKCSSIDCLGRRIGPSF
LGRQGGDSMRLVQDLYRIFDQVNNEESPDDKRIPESFRDFLLEMKDSHYDARTFAVRLKA
TMENMDKEVKKLRLAEQLYKHYAATAIPKGIHCLSLRLTDEYSSNAHARKQLPPPELLPL
LSDNSFQHYILASDNILAASVVVSSTVRSSSVPHKVVFHVITDKKTYPGMHSWFALNSIS
PAIVEVKGVHQFDWLTRENVPVLEAIENHRGVRNHYHGDHAAVSSASDSPRVLASKLQAR
SPKYISLLNHLRIYLPELFPNLNKVVFLDDDIVIQRDLSPLWKINLEGKVNGAVETCRGE
DNWVMSKRFRTYFNFSHPVIARSLDPDECAWAYGMNIFDLAAWRKTNIRETYHFWLKENL
KSGLTLWKFGTLPPALIAFRGHLHGIDPSWHMLGLGYQENTDIEGVRRSAVIHYNGQCKP
WLDIAFKNLQPFWTKHVNYSNDFIRNCHILEPQYDKE*
Amino acid sequence of LOC_Os05g35200.1|12005.m07750
(SEQ ID NO: 12)
MGSLETRYRPAGAPSDDTTKRRTPKSRIYKDVENFGVLVLEKNSGCKFKTLRYLLLAITS
ATFLTLLTPTFYEHQLQSSRYVDVGWIWDKPSYDPRYVSSVDVQWEDVYKALENLNDGSQ
KLKVGLLNFNSTEYGSWAQLLPGSAVSIVRLEHAKDSITWDTLYPEWIDEEEETDIPACP
SLPDPNVRKGSHFDVIAVKLPCTRVGGWSRDVARLHLQLSAAKLAVASSKGNQKVHVLFV
TDCFPIPNLFPCKNLVKHEGNAWLYSPDLKALREKLRLPVGSCELAVPLKAKARLYSVDR
RREAYATILHSASEYVCGAISAAQSIRQAGSTRDLVILVDDTISDHHRKGLEAAGWKVRV
IQRIRNPKAERDAYNEWNYSKFRLWQLTDYDKIIFIDADLLILRNVDFLFAMPEITATGN
NATLFNSGVMVIEPSNCTFQLLMDHTNEITSYNGGDQGYLNEIFTWWHRIPKHMNFLKHF
WEGDDDSAKAKKTELFGADPPILYVLHYLGMKPWLCFRDYDCNWNIPLMREFASDVAHAR
WWKVHDNMPEKLQSYCLLRSKLKAGLEWERRQAEKANLEDGHWRRNITDPRLTICYEKFC
YWESMLLHWGEKNPTNNNPVPATISSS*
Amino acid sequence of LOC_Os06g12280.1|12006.m05945
(SEQ ID NO: 13)
MAGGRAFRPSAPRRAAFAALLTLLLLATLSFLLSSPPPTHASHRSSYLGASPPSRLAAIR
RHAADHAAVLAAYAAHARRLKEASAAQSLSFATMSSDLSALSSRLASHLSLPEDAVKPLE
KEARDRIKLARLLAADAKEGFDTQSKIQKLSDTVFAVGEHLARARRAGRMSSRIAAGSTP
KSLHCLAMRLLEARLAKPSAFADDPDPSPEFDDPSLYHYAVFSDNVLAVSVVVASAARAA
ADPSRHVFHVVTAPMYLPAFRVWFARRPPPLGVHVQLLAYSDFPFLNETSSPVLRQIEAG
KRDVALLDYLRFYLPDMFPALQRVVLLEDDVVVQKDLAGLWHLDLDGKVNGAVEMCFGGF
RRYSKYLNFTQAIVQERFDPGACAWAYGVNVYDLEAWRRDGCTELFHQYMEMNEDGVLWD
PTSVLPAGLMTFYGNTKPLDKSWHVMGLGYNPSISPEVIAGAAVIHFNGNMKPWLDVALN
QYKALWTKYVDTEMEFLTLCNFGL*
Amino acid sequence of LOC_Os02g54820.3|12002.m10510
(SEQ ID NO: 14)
MPSLSCHNLLDLVAAADDAAPSPASLRLPRVMSAASPASPTSPSTPAPARRVVVSHRLPL
RAAADAASPFGFSFTVDSDAVAYQLRSGLPPGAPVLHIGTLPPPATEAASDELCNYLLAN
FSCLPVYLPADLHRRFYHGFCKHYLWPLLHYLLPLTPSSLGGLPFDRALYHSFLSANRAF
ADRLTEVLSPDDDLVWIHDYHLLALPTFLRKRFPRAKVGFFLHSPFPSSEIFRTIPVRED
LLRALLNADLVGFHTFDYARHFLSACSRLLGLDYQSKRGYIGIEYYGRTVTVKILPVGID
MGQLRSVVSAPETGDLVRRLTESYKGRRLMVGVDDVDLFKGIGLKFLAMEQLLVEHPELR
GRAVLVQIANPARSEGRDIQEVQGEARAISARVNARFGTPGYTPIVLIDRGVSVHEKAAY
YAAAECCVVSAVRDGLNRIPYIYTVCRQESTGLDDAAKRSVIVLSEFVGCSPSLSGAIRV
NPWSVESMAEAMNAALRMPEPEQRLRHEKHYKYVSTHDVAYWAKSFDQDLQRACKDHFSR
RHWGIGFGMSFKVVALGPNFRRLSVDHIVPSYRKSDNRLILLDYDGTVMPEGSIDKAPSN
EVISVLNRLCEDPKNRVFIVSGRGKDELGRWFAPCEKLGIAAEHGYFTRWSRDSAWETCG
LAVDFDWKKTAEPVMRLYKEATDGSTIEDKESALVWHHDEADPDFGSCQAKELLDHLENV
LANEPVVVKRGQHIVEVNPQVSACHLPSFL*
Amino acid sequence of LOC_Os05g44210.1|12005.m08547
(SEQ ID NO: 15)
MPTPAPSASSSSSSCGGGGGGAGAASSYSSSPDDRMLRGECGRRHPFASSAAVGAGSPDA
MDTDSAEPSSAATSVADFGARSPFSPGAASPANMDDAGGASAAGHAARPPLAGPRSGFRR
LGLRGMKQRLLVVANRLPVSANRRGEDQWSLEISAGGLVSALLGVKDVDAKWIGWAGVNV
PDEVGQRALTRALAEKRCIPVFLDEEIVHQYYNGYCNNILWPLFHYLGLPQEDRLATTRN
FESQFNAYKRANQMFADVVYQHYKEGDVIWCHDYHLMFLPKCLKDHDINMKVGWFLHTPF
PSSEIYRTLPSRSELLRSVLCADLVGFHTYDYARHFVSACTRILGLEGTPEGVEDQGRLT
RVAAFPIGIDSERFKRALELPAVKRHITELTQRFDGRKVMLGVDRLDMIKGIPQKILAFE
KFLEENHEWNDKVVLLQIAVPTRTDVPEYQKLTSQVHEIVGRINGRFGTLTAVPIHHLDR
SLDFHALCALYAVTDVALVTSLRDGMNLVSYEYVACQGSKKGVLILSEFAGAAQSLGAGA
ILVNPWNITEVADSIKHALTMSSDEREKRHRHNYAHVTTHTAQDWAETFVCELNETVAEA
QLRTRQVPPDLPSQAAIQQYLHSKNRLLILGFNSTLTEPVESSGRRGGDQIKEMELKLHP
ELKGPLRALCEDEHTTVIVLSGSDRSVLDENFGEFNMWLAAEHGMFLRPTNGEWMTTMPE
HLNMDWVDSVKNVFEYFTERTPRSHFEHRETSFVWNYKYADVEFGRLQARDMLQHLWTGP
ISNAAVDVVQGSRSVEVRSVGVTKGAAIDRILGEIVHSKSMITPIDYVLCIGHFLGKVIM
QLIYMCISVSFSARCFFCL*
Amino acid sequence of LOC_Os08g34580.1|12008.m07447
(SEQ ID NO: 16)
MPSLPNSGDEGGAPPPTPPPPGARRVVVAHRLPLRADPNPGAPHGFDFSLDPHALPLQLS
HGVPRPVVFVGVLPSAVAEAVQASDELAADLLARFSCYLVFLPAKLHADFYDGFCKHYMW
PHLHYLLPLAPSYGRGGGLPFNGDLYRAFLTVNTHFAERVFELLNPDEDLVFVHDYHLWA
FPTFLRHKSPRARIGFFLHSPFPSSELFRAIPVREDLLRALLNADLVGFHTFDYARHFLS
ACSRVLGLSNRSRRGYIGIEYFGRTVVVKILSVGIDMGQLRAVLPLPETVAKANEIADKY
RGRQLMLGVDDMDLFKGIGLKLLAMERLLESRADLRGQVVLVQINNPARSLGRDVDEVRA
EVLAIRDRINARFGWAGYEPVVVIDGAMPMHDKVAFYTSADICIVNAVRDGLNRIPYFYT
VCRQEGPVPTAPAGKPRQSAIIVSEFVGCSPSLSGAIRVNPWNVDDVADAMNTALRMSDG
EKQLRQEKHYRYVSTHDVVYWAQSFDQDLQKACKDNSSMVILNFGLGMGFRVVALGPSFK
KLSPELIDQAYRQTGNRLILLDYDGTVMPQGLINKAPSEEVIRTLNELCSDPMNTVFVVS
GRGKDELAEWFAPCDEKLGISAEHGYFTRWSRDSPWESCKLVTHFNWKNIAGPVMKHYSD
ATDGSYIEVKETSLVWHYEEADPDFGSCQAKELQDHLQNVLANEPVFVKSGHQIVEVNPQ
GVGKGVAVRNLISTMGNRGSLPDFILCVGDDRSDEDMFEAMISPSPAFPETAQIFPCTVG
NKPSLAKYYLDDPADVVKMLQGLTDSPTQQQPRPPVSFENSLDD*.
Amino acid sequence of LOC_Os12g05550.1|12012.m04548
(SEQ ID NO: 17)
MKRRHLPPVLVLLLLSILSLSFRRRLLVLQGPPSSSSSSRHPVGDPLLRRLAADDGAGSS
QILAEAAALFANASISTFPSLGNHHRLLYLRMPYAFSPRAPPRPKTVARLRVPVDALPPD
GKLLASFRASLGSFLAGRRRRGRGGNVAGVMRDLAGVLGRRYRTCAVVGNSGVLLGSGRG
PQIDAHDLVIRLNNARVAGFAADVGVKTSLSFVNSNILHICAARNAITRAACGCHPYGGE
VPMAMYVCQPAHLLDALICNATATPSSPFPLLVTDARLDALCARIAKYYSLRRFVSATGE
PAANWTRRHDERYFHYSSGMQAVVMALGVCDEVSLFGFGKSPGAKHHYHTNQKKELDLHD
YEAEYDFYGDLQARPAAVPFLDDAHGFTVPPVRLHW*
Amino acid sequence of LOC_Os08g02370.1|12008.m04381
(SEQ ID NO: 18)
MFAPAAAARPHKQAPLARVPTRLVAALCTACFFLGVCVVNRYWAVPELPDCRTKVNSDNP
GAVMNQVSQTREVIIALDRTISEIEMRLAAARTMQARSQGLSPSDSGSDQGSTRARLFFV
MGIVTTFANRKRRDSIRQTWLPQGEHLQRLEKEKGVVIRFVIGRSANPSPDSEVERAIAA
EDKEYNDILRLDHVERNGSLPLKIQMFLSTALSIWDADFYVKVDDDVHVNIGITRSILAR
HRSKPRVYIGCMKSGPVVDKNESKYYEPDHWKFGTEGNNYFRHATRQLYAVTRDLATYIS
ANRHILHKYSNEDVSFGSWLIGLDVEHVDERSLCCGTPPDCEWKAQAGNPCAASFDWNCT
GICNPVERMEEVHRRCWEGHVADLQAQF*
Amino acid sequence of LOC_Os02g52560.1|12002.m10287
(SEQ ID NO: 19)
MDVKRARSPRAPGVDADDDKKRAAEWRGAVRPHMVLVGFLITLPVLVFVFGGRWGSFQTT
SAPNVGGRHVVPGGVTTTQKNEAPKNVSVPATATKSLPQPQDKLLGGLLSAAFEESSCQS
RYKSSLYRKKSPFPLSPYLVQKLRKYEAYHKKCGPGTKRYRKAIEQLKAGRNADNAECKY
VVWFPCNGLGNRMLTIASTFLYALISNRVLLMHVAAEQEGLFCEPFPGSSWVLPGDFPHN
NPQGLHIGAPESYVNMLKNNVVRNDDPGSVSASSLPPYVYLHVEQFRLKLSDNIFCDEDQ
LILNKFNWMILKSDSYFAPALFMTPMYEKELEKMFPQKESVFHHLGRYLFHPTNKVWGIV
SRYYEAYLARVDEKIGFQIRIFPEKPIKFENMYDQLTRCIREQRLLPELGTAEPANTTAE
AGKVKAVLIASLYSGYYEKIRGMYYENPTKTGEIVAVYQPSHEEQQQYTSNEHNQKALAE
IYLLSYCDKIAMSAWSTFGYVAYSFAGVKPWILLRPDWDKERSEVACVRSTSVEPCLHSP
PILSCRAKKEVDAATVKPYVRHCEDVGFGLKLFDS*
Amino acid sequence of LOC_Os07g49370.1|12007.m09146
(SEQ ID NO: 20)
MASAGGCKKKTGNSRSRSPRSPVVLRRAMLHSSLCFLVGLLAGLAAPSDWPAAAGAAVFL
RTLRASNVIFSRSSNRPQQPQLVVVVTTTEQSDDSERRAAGLTRTAHALRLVSPPLLWLV
VEEAPAEKHAAPPTARLLRRTGVVHRHLLMKQGDDDFSMQISMRREQQRNVALRHIEDHR
IAGVVLFGGLADIYDLRLLHHLRDIRTFGAWPVATVSAYERKVMVQGPLCINTSSSSVIT
RGWFDMDMDMAAGGERRAAADRPPPETLMEVGGFAFSSWMLWDPHRWDRFPLSDPDASQE
SVKFVQRVAVEEYNQSTTRGMPDSDCSQIMLWRIQTTL*
Amino acid sequence of LOC_Os01g70190.1|12001.m13067
(SEQ ID NO: 21)
MAMRLSSAAVALALLLAATALEDVARGQDTERIEGSAGDVLEDDPVGRLKVYVYELPTKY
NKKMVAKDSRCLSHMFAAEIFMHRFLLSSAIRTLNPEEADWFYTPVYTTCDLTPWGHPLP
FKSPRIMRSAIQFISSHWPYWNRTDGADHFFVVPHDFGACFHYQEEKAIERGILPLLRRA
TLVQTFGQKDHVCLKEGSITIPPYAPPQKMKTHLVPPETPRSIFVYFRGLFYDTANDPEG
GYYARGARASVWENFKNNPLFDISTDHPPTYYEDMQRSIFCLCPLGWAPWSPRLVEAVVF
GCIPVIIADDIVLPFADAIPWDEIGVFVAEDDVPKLDTILTSIPMDVILRKQRLLANPSM
KQAMLFPQPAQPGDAFHQILNGLGRKLPHPKSVYLDPGQKVLNWTQGPVGDLKPW*
Amino acid sequence of LOC_Os04g57510.2|12004.m10636
(SEQ ID NO: 22)
MWHVRKEIAPAILLVVDFGGWYKLDSNSASSNVSHMIQHTQVSLLKDVIVPYTHLLPTMH
LSENKDRPTLLYFKGAKHRHRGGLVREKLWDLMVNEPDVVMEEGYPNATGREQSIKGMRT
SEFCLHPAGDTPTSCRLFDAVASLCIPVIVSDEIELPFEGMIDYTEFAIFVSVNNSMRPK
WLTNYLRNVPRQQKDEFRRNMAHVQPIFEYDSIYPGRMASAAQDGAVNHIWKKIHQKLPM
IQEAVTREKRKPDGTSIPLRCHCT*
Amino acid sequence of LOC_Os02g58560.2|12002.m100475
(SEQ ID NO: 23)
MDVPTNLDARRRISFFANSLFMDMPSAPKVRHMLPFSVLTPYYKEDVLFSSQALEDQNED
GVSILFYLQKIYPDEWKHFLQRVDCNTEEELRETEQLEDELRLWASYRGQTLTRTAVALP
YSQRDDVLQTSFGASGFS*
Amino acid sequence of LOC_Os06g02260.1|12006.m04960
(SEQ ID NO: 24)
MLTFFFTTVGYYVCTMMTVLTVYIFLYGRVYLALSGLDYEISRQFRFLGNTALDAALNAQ
FLVQIGIFTAVPMIMGFILELGLLKAIFSFITMQLQFCSVFFTFSLGTRTHYFGRTILHG
GAKYHATGRGFVVRHIKFAENYRLYSRSHFVKALEVALLLIIYIAYGYTRGGSSSFILLT
ISSWFLVVSWLFAPYIFNPGSFEWQKTVEDFDDWTNWLLYKGGVGVKGENSWESWWDEEQ
AHIQTLRGRILETILSLRFLIFQYGIVYKLKIASHNTSLAVYGFSWIVLLVLVLLFKLFT
ATPKKSTALPTFVRFLQGLLAIGMIAGIALLIALTKFTIADLFASALAFVATGWCVLCLA
VTWKRLVKFVGLWDSVREIARMYDAGMGALIFVPIVFFSWFPFVSTFQSRFLFNQAFSRG
LEISLILAGNKANQEA*
Amino acid sequence of LOC_Os02g22380.1|12002.m07476
(SEQ ID NO: 25)
MTSTAYSRPSKLPGGGNGSDRRLPPRLMRGLTTKIEPKKLGVGLLAGCCLALLTYVSLAK
LFAIYSPVFASTANTSALMQNSPPSSPETGPIPPQETAAGAGNNDSTVDPVDLPEDKSLV
EAQPQEPGFPSAESQEPGLPAALSRKEDDAERAAAAAASEIKQSEKKNGVAAGGDTKIKC
DENGVDEGFPYARPSVCELYGDVRVSPKQKTIYVVNPSGAGGFDENGEKRLRPYARKDDF
LLPGVVEVTIKSVPSEAAAPKCTKQHAVPAVVFSVAGYTDNFFHDMTDAMIPLFLTTAHL
KGEVQILITNYKPWWVQKYTPLLRKLSNYDVINFDEDAGVHCFPQGYLGLYRDRDLIISP
HPTRNPRNYTMVDYNRFLRDALELRRDRPSVLGEEPGMRPRMLIISRAGTRKLLNLEEVA
AAATELGFNVTVAEAGADVPAFAALVNSADVLLAVHGAGLTNQIFLPAEAVVVQIVPWGN
MDWMATNFYGQPARDMQLRYVEYYVGEEETSLKHNYSRDHMVFKDPKALHAQGWQTLAAT
IMKQDVEVNLTRFRPILLQALDRLQQ*
Amino acid sequence of LOC_Os06g27560.1|12006.m07301
(SEQ ID NO: 26)
MSSTAYTRPSKPPGPAGERRPPRLAKELGRIEPKKLGIGLVAGCCLALLTYISFARLFAI
YSPVFESTSLVMKNAPPASTQQNPVLAQQQSKEEDEKDVGEDETDRKVPSFAETTEKNEE
EETVTKPSGDEAEATISCDENGVDEGFPYARPPVCELTGDIRISPKEKTMFFVNPSSAGA
FDGNGEKKIRPYARKDDFLLPGVVEVIIKSVSSPAIAPACTRTHNVPAVVFSVAGYTDNF
FHDNTDVMIPLFLTTSHLAGEVQFLITNFKPWWVHKFTPLLKKLSNYGVINFDKDDEVHC
FRRGHLGLYRDRDLIISPHPTRNPRNYSMVDYNRFLRRAFGLPRDSPAVLGDKTGAKPKM
LMIERKGTRKLLNLRDVAALCEDLGFAVTVAEAGADVRGFAEKVNAADVLLAVHGAGLTN
QIFLPTGAVLVQIVPWGKMDWMATNFYGQPARDMRLRYVEYYVSEEETTLKDKYPRDHYV
FKDPMAIHAQGWPALAEIVMKQDVTVNVTRFKPFLLKALDELQE*
Amino acid sequence of LOC_Os06g28124.1|12006.m07356
(SEQ ID NO: 27)
MVSQSKTPAPEPSTTKMPSAPPAVKGVAKTLAQHHKAVIGFLLGFFLVLLLYTFLSGQLV
SSEDAIVRAVTQQSTPAVHTDQDGRTTSPTSPTSTSSNTTQDNLEGKNTERSSQPAVNDE
ASDKMEEDLIRQDIDQAGTKNGTNHKPGAPRKPICDLLDPRYDICEISGDARTMGTNRTI
LYVPPVGERGLADDSHEWSIRDQSRKYLEYINKVTVRSLDAQAAPGCTSRHAVPAVVFAM
NGLTSNPWHDFSDVLIPLFITTRVYEGEVQFLVSDLQPWFVDKYRLILTNLSRYDIVDFN
QDSDVRCYPKITVGLRSHRDLGIDPARTQRNYTMLDFRLYIREVYSLPPAGVDIPFKESS
MQRRPRAMLINRGRTRKFVNFQEIAAAVVAAGFEVVPVEPRRDLSIEEFSRVVDSCDVLM
GAHGAGLTNFFFLRTNAVMLQVVPWGHMEHPSMVFYGGPAREMRLRDVEYSIAAEESTLY
DKYSKDHPAIRDPESIHKQGWQFGMKYYWIEQDIKLNVTRFAPTLQQVLQMLRG*
Amino acid sequence of LOC_Os03g40270.1|12003.m09110
(SEQ ID NO: 28)
MAGTVTVPSASVPSTPLLKDELDIVIPTIRNLDFLEMWRPFFQPYHLIIVQDGDPTKTIR
VPEGFDYELYNRNDINRILGPKASCISFKDSACRCFGYMVSKKKYVFTIDDDCFVAKDPS
GKDINALEQHIKNLLSPSTPFFFNTLYDPYREGADFVRGYPFSLREGAKTAVSHGLWLNI
PDYDAPTQMVKPRERNSRYVDAVMTVPKGTLFPMCGMNLAFDRDLIGPAMYFGLMGDGQP
IGRYDDMWAGWCMKVICDHLSLGVKTGLPYIWHSKASNPFVNLKKEYKGIFWQEDIIPFF
QNATIPKECDTVQKCYLSLAEQVREKLGKIDPYFVKLADAMVTWIEAWDELNPSTAAVEN
GKAK*
Amino acid sequence of LOC_Os03g63270.1|12003.m11195
(SEQ ID NO: 29)
MLGGGKMKGGETMGGGGGSGSSSISPLVSFVLGAAMATVCILFVMSASPGRRLADISAWS
NADDAPPLPLPLQDAAVDSNDSLAAAAAANVTVVAAPAPAPVQAPAPASPYGDLEEVLRR
AATKDRTVIMTQINLAWTKPGSLLDLFFESFRLGEGGVSRLLDHLVIVTMDPAAYEGCQA
VHRHCYFLRTTGVDYRSEKMFMSKDYLEMMWGRNKFQQTILELGYNFLFTDVDVMWFRDP
FRHISMGADIAISSDVFIGDPYSLGNFPNGGFLFVRSNDKTLDFYRSWQQGRWRFFGKHE
QDVFNLIKHEQQAKLGIAIQFLDTTYISGFCQLSKDLNKICTLHANCCVGLGAKMHDLRG
VLDVWRNYTAAPPDERRSGKFQWKLPGICIH*
Amino acid sequence of LOC_Os07g19444.1|12007.m06379
(SEQ ID NO: 30)
MTKSATSLLLGAALATVFFLLYTSVCRDLGDGPPKSSPPRWAHAQEQGTATVTPATRVVD
AEQGTGRPGRQEEEVVAPREEKQTKDEAASRSGHGGGSVEQQQNQRRIVMPTSQQKETPS
SPPQRQQQDLGELLRRAATPDKTVLMTAINEAWAAPGSFLDLFLESFRHGEGTEHLVRHL
LVVAMDGRAFERCNAVHQFCYWFRVDGMDFAAEQSYMKGDYLEMMWRRNRFQQTILELGF
SFLFTDVDILWFRSPFPHLSPDAQVVMSSDFFVGDPTSPGNYPNGGLLYVRSSASTVRFY
EHWQSSRARFPGKHEQFVFDRIVKEGVPPHVGATVRFLDTGHFGGFCQHGKDLGRVVTMH
ANCCVGLHNKLFDLRNVLDDWKTYKERVAAGNMDYFSWRVPGRCIH*
>LOC_Os01g08080.1
(SEQ ID NO: 31)
MAAELHFLVVPLIAQGHIIPMVEVARLLAARGARATVVTTPVNAARNGAAVEAARRDGLAVDLAEVAFPGPEFGVPE
GLENMDQLADADPGMYLSLQRAIWAMAARLERLVRALPRRPDCLVADYCNPWTAPVCDRLGIARVVMHCPSAYFLLA
THNLSKHGVYGRLALAAGDGELEPFEVPDFPVRAVVYTATFRRFFQWPGLEEEERDAVEAERTADGFVINTFRDIEG
AFVDGYAAALGRRAWAIGPTFGSISHLAAKQVIELARGVEASGRPFVWTIKEAKAAAAAVREWLDGEGYEERVKDRG
VLVRGWAPQVSILSHPATGGFLTHCGWNAALEAIARGVPALTWPTILDQFSSERLLVDVLGVGVRSGVTAPPMYLPA
EAEGVQVTGAGVEKAVAELMDGGADGVARRARARELAATARAAVEEGGSSHADLTDMIRHVGAQ
>LOC_Os01g43270.1
(SEQ ID NO: 32)
MAPAHAVTPHVVLLPSPGAGHVAPAAQLAARLATHHGCTATIVTYTNLSTARNSSALASLPTGVTATALPEVSLDDL
PADARIETRIFAVVRRTLPHLRELLLSFLGSSSPAGVTTLLTDMLCPAALAVAAELGIPRYVFFTSNLLCLTTLLYT
PELATTTACECRDLPEPVVLPGCVPLHGADLIDPVQNRANPVYQLMVELGLDYLLADGFLINTFDAMEHDTLVAFKE
LSDKGVYPPAYAVGPLVRSPTSEAANDVCIRWLDEQPDGSVLYVCLGSGGTLSVAQTAELAAGLEASGQRFLWVVRF
PSDKDVSASYFGTNDRGDNDDPMSYLPEGFVERTKGAGLAVPLWAPQVEVLNHRAVGGFLSHCGWNSTLEAASAGVP
TLAWPLFAEQKMNAVMLSSERVGLAALRVRPDDDRGVVTREEVASAVRELMAGKKGAAAWKKARELRAAAAVASAPG
GPQHQALAGMVGEWKGRG
>LOC_Os01g49230.1
(SEQ ID NO: 33)
MSQETPARRSLPHLLLVSAPLQGHVNPLLCLGGRLSSRGLLVTFTTVPHDGLKLKLQPNDDGAAMDVGSGRLRFEPL
RGGRLWAPADPRYRAPGDMQRHIQDAGPAALEGLIRRQANAGRPVSFIVANAFAPWAAGVARDMGVPRAMLWTQSCA
VLSLYYHHLYSLVAFPPAGAETGLPVPVPGLPALTVGELPALVYAPEPNVWRQALVADLVSLHDTLPWVLVNTFDEL
ERVAIEALRAHLPVVPVGPLFDTGSGAGEDDDCVAWLDAQPPRSVVFVAFGSVVVIGRDETAEVAEGLASTGHPFLW
VVRDDSRELHPHGESGGGGDKGKVVAWCEQRRVLAHPAVGCFVTHCGWNSTTEALAAGVPVVAYPAWSDQITNAKLL
ADVYGVGVRLPVRRRGHERAGGGGDAAEGAGVERQGERGGG
>LOC_Os01g53380.1
(SEQ ID NO: 34)
MRVEKAPFPEGFLRRTKGRGLVVMSWAPQRKVLEHSAVGGFVTHCGWNSMLEALTAGVPMLAWPLYAEQRMNKVFLV
EEMRLAVAVEGYDKGVVTAEEIQEKARWIMDSNGGRELRERSLAAMWEVKEALSDKGEFKIALLQLTSQWKNYNNS
>LOC_Os01g53420.1
(SEQ ID NO: 35)
MTANNSAVGNIDSHLYPLVVLHKHAENTSHNRAMRSRVVLYTWMVRGHLHPMTQLADRIANHGVPVTVAVADVPSSG
ESRKTVARLSAYYPSVSFQLLPPAAPARSGADTADPDADPFITLLADLRATNAALTAFVRSLPSVEALVIDFFCAYG
LDAAAELGVPAYLFFVSCASALASYLHIPVMRSAVSFGQMGRSLLRIPGVHPIPASDLPEVLLLDRDKDQYKATIAF
FEQLAKAKSVLVNTFEWLEPRAVKAIRDGIPRPGEPAPRLFCVGPLVGEERGGEEEKQECLRWLDAQPPRSVVFLCF
GSASSVPAEQLKEIAVGLERSKHSFLWAVRAPVAADADSTKRLEGRGEAALESLLPEGFLDRTWGRGLVLPSWAPQV
EVLRHPATGAFVTHCGWNSTLEAVTAGVPMVCWPMYAEQRMNKVFVVEEMKLGVVMDGYDDDGVVKAEEVETKVRLV
MESEQGKQIRERMALAKQMATRAMEIGGSSTASFTDFLGGLKIAMDKDN
>LOC_Os01g64910.1
(SEQ ID NO: 36)
MDKTIVLYPGLYVSHFVPMMQLADALLEHGYAVAVALIHVTMDEDATFAAAVARVAAAAKPSVTFHKLPRIHDPPAI
TTIVGYLEMVRRYNERLREFLRSGVRGRSGGIAAVVVDAPSIEALDVARELGIPAYSFFASTASALAVFLHLPWFRA
RAASFEELGDAPLIVPGVPPMPASHLMPELLEDPESETYRATVSMLRATLDADGILVNTFASLEPRAVGALGDPLFL
PATGGGEPRRRVPPVYCVGPLVVGHDDDDERKENTRHECLAWLDEQPDRSVVFLCFGGTGAVTHSAEQMREIAAGLE
NSGHRFMWVVRAPRGGGDDLDALLPDGFLERTRTSGHGLVVERWAPQADVLRHRSTGAFVTHCGWNSASEGITARVP
MLCWPLYAEQRMNKVFMVEEMGVGVEVAGWHWQRGELVMAEEIEGKIRLVMESEEGERLRSSVAAHGEAAAVAWRKD
GGAGAGSSRAALRRFLSDVGGRELRSVETLLLWAFHEIVVARIGLPLD
>LOC_Os01g66620.1
(SEQ ID NO: 37)
MAYLLGKPQHELVERQQIGWLAGPFAVIVDLLAPLFVDLLRRRPADAVVFDGVLPWAATAAARLRIPRYAFTGTGCF
ALPVQRALLLHAPQDRVASDDEPFLVPGLPDAVRLFRP
>LOC_Os02g11130.1
(SEQ ID NO: 38)
MTAPMTAESTTQPPSPQPHFVLAPLAAHGHVIPMVDLAGLLAAHGARASLVTTPLNATRLRGVADKAAREKLPLEIV
ELPFSPAVAGLPSDCQNADKLSEDAQLTPFLIAMRALDAPFEAYVRALERRPSCIISDWCNTWAAGVAWRIGIPRLF
FHGPSCFYSLCDLNAVVHGLHEQIVADDEQETTYVVPRMPVRVTVTKGTAPGFFNFPGYEALRDEAIEAMLAADGVV
VNTFLDLEAQFVACYEAALGKPVWTLGPLCLHNRDDEAMASCGTGSTDLRAITAWLDEQVTGSVVYVSFGSVLRKLP
KHLFEVGNGLEDSGKPFLWVVKESELVSSRPEVQEWLDEFMARTATRGLVVRGWAPQVTILSHRAVGGFLTHCGWNS
LLEAIARGVPVATWPHFADQFLNERLAVDVLGVGVPIGVTAPVSMLNEEYLTVDRGDVARVVSVLMDGGGEEAEERR
RKAKEYGEQARRAMAKGGSSYENVMRLIARFMQTGVEEH
>LOC_Os02g11670.1
(SEQ ID NO: 39)
MYRLDKRIYEERQETKLFNDMIQKVPKYLFEVGHGLEDSGKPFIWVVKVSEVATPEVQEWLSALEARVAGRGVVVRG
WAPQLAILSHRAVGGFVTHCGCNSILEDITHGVPVVTWPHISDQFLNERLAVDVLGVGVPEARLPVVTAVKINPYLY
RYLGSTTGRYLGSTTACGNCY
>LOC_Os02g11680.1
(SEQ ID NO: 40)
MAPTPDSVSATSPPPPLPPPHFVIVPFPAQGHTIPMVDLARLLAERGARASLVVTPVNAAHLRGVADHAARAKLPLE
IVEVSFSPSAADAGLPPGVENVDQITDYAHFRPFFDVMRHLAAPLEAYLRALPVPPSCVISDWSNPWTAGVASRVGV
PRLFFHGPSCFYSLCDLNAAAHGLQQQGDDDRILQLTMEAMRTADGAVVNTFKDLEDEFIACYEAALGKPVWTLGPF
CLYNRDADAMASRGNTLDVAQSAITTWLDGMDTDSVTYVNFGSLACKVPKYLFEVGHGLEDSGKPFICVVKESEVAT
PEVQEWLSALEARVAGRGVVAACGTIFGVIPFVSRRSLGIISGMTGAGVNFGAGLTQL
>LOC_Os02g11700.1
(SEQ ID NO: 41)
MAPTAELDTATSPPPPHFVIVPFPAQGHTIPMVDLARLLAERGVRASLVVTPVNAARLRGAADHAARAELPLEIVEV
PFPPSAADAGLPPGVENVDQITDYAHFRPFFDVMRELAAPLEAYLRALPAPPSCIISDWSNSWTAGVARRAGVPRLF
FHGPSCFYSLCDLNAAAHGLQQQGDDDRYVVPGMPVRVEVTKDTQPGFFNTPGWEDLRDAAMEAMRTADGGVVNTFL
DLEDEFIACFEAALAKPVWTLGPFCLYNRDADAMASRGNTPDVAQSVVTTWLDAMDTDSVIYVNFGSLARKVPKYLF
EVGHGLEDSGKPFIWVVKESEVAMPEVQEWLSALEARVAGRGVVVRGWAPQLAILSHRAVGGFVTHCGWNSILESIA
HGVPVLTWPHFTDQFLNERLAVNVLGVGVPVGATASVLLFGDEAAMQVGRADVARAVSKLMDGGEEAGERRRKAKEY
GEKAHRAMEKGGSSYESLTQLIRRFTLQEPKNSSSITVECSANRHI
>LOC_Os02g14540.1
(SEQ ID NO: 42)
MRRFVPQLRALVVGIGSTTAAIVCDFFGTPALALVAELGVPGYVFFPTSISFISVVRSVVELHDDAAVGEYRDLPDP
LVLPGCAPLRHDEIPDGFQDCADPNYAYVLEEGRRYGGADGFLVNSFPEMEPGAAEAFRRDAENGAFPPVYLVGPFV
RPNSNEDPDESACLEWLDHQPAGSVVYVSFGSGGALSVEQTAELAAGLEMSGHNFLWVVRMPSTGRLPYSMGAGHSN
PMNFLPEGFVERTSGRGLAVASWAPQVRVLAHPATAAFVSHCGWNSTLESVSSGVPMIAWPLYAEQKMNTVILTEVA
GVALRPVAHGGDGGVVSRKEVAAAVKELMDPGEKGSAVRRRARELQAAAAARAWSPDGASRRALEEVAGKWKNAVRE
DR
>LOC_Os02g14570.1
(SEQ ID NO: 43)
MAEAATGATDTSLPPPPPHVVLMASPGAGHLIPLAELARRLVSDHGFAVTVVTIASLSDPATDAAVLSSLPASVATA
VLPPVALDDLPADIGFGSVMFELVRRSVPHLRPLVVGSPAAAIVCDFFGTPALALAAELGVPGYVFFPTSISFISVV
RSVVELHDGAAAGEYRDLPDPLVLPGCAPLRHGDIPDGFRDSADPVYAYVLEEGRRYGGADGFLVNSFPEMEPGAAE
AFRRDGENGAFPPVYLVGPFVRPRSDEDADESACLEWLDRQPAGSVVYVSFGSGGALSVEQTRELAAGLEMSGHRFL
WVVRMPRKGGLLSSMGASYGNPMDFLPEGFVERTNGRGLAVASWAPQVRVLAHPATAAFVSHCGWNSALESVSSGVP
MIAWPLHAEQKMNAAILTEVAGVALPLSPVAPGGVVSREEVAAAVKELMDPGEKGSAARRRARELQAAAAARAWSPD
GASRRALEEVAGKWKNAVHEDR
>LOC_Os02g14590.1
(SEQ ID NO: 44)
MAELARRLVAFHGCAATLVTFSGLAASLDAHSAAVLASLPASSVAAVTLPEVTLDDVPADANFGTLIFELVRRSLPN
LRQFLRSIGGGVAALVSDFFCGVVLDLAVELGVPGYVFVPSNTASLAFMRRFVEVHDGAAPGEYRDLPDPLRLAGDV
TIRVADMPDGYLDRSNPVFWQLLEEVRRYRRADGFLVNSFAEMESTIVEEFKTAAEQGAFPPVYPVGPFVRPCSDEA
GELACLEWLDRQPAGSVVFVSFGSAGMLSVEQTRELAAGLEMSGHGFLWVVRMPSHDGESYDFATDHRNDDEEDRDG
GGHDDDPLAWLPDGFLERTSGRGLAVASWAPQVRVLSHPATAAFVSHCGWNSALESVSAGVPMVPWPLYAEQKVNAV
ILTEVAGVALRPAAARGGVDGVVTREEVAAAVEELMDPGEKGSAARRRAREMQAAAARARSPGGASHRELDEVAGKW
KQTNRAPYE
>LOC_Os02g14630.1
(SEQ ID NO: 45)
METFTADDQRDADAPRPPRVVLLASPGAGHLIPLAELARWLADHHGVAPTLVTFADLEHPDARSAVLSSLPATVATA
TLPAVPLDDLPADAGLERTLFEVVHRSLPNLRALLRSAASLAALVPDIFCAAALPVAAELGVPGYVFVPTSLAALSL
MRRTVELHDGAAAGEQRALPDPLELPGGVSLRNAEVPRGFRDSTTPVYGQLLATGRLYRRAAGFLANSFYELEPAAV
EEFKKAAERGTFPPAYPVGPFVRSSSDEAGESACLEWLDLQPAGSVVFVSFGSAGTLSVEQTRELAAGLEMSGHRFL
WVVRMPSFNGESFAFGKGAGDEDDHRVHDDPLAWLPDGFLERTSGRGLAVAAWAPQVRVLSHPATAAFVSHCGWNST
LESVAAGVPMIAWPLHAEQTVNAVVLEESVGVAVRPRSWEEDDVIGGAVVTREEIAAAVKEVMEGEKGRGMRRRARE
LQQAGGRVWSPEGSSRRALEEVAGKWKAAATATAHK
>LOC_Os02g14680.1
(SEQ ID NO: 46)
MEPFTSAAVEPAPPTADDQRDAPRPHVVLLASPGAGHLIPLAELARRLADHHGVAPTLVTFADLDNPDARSAVLSSL
PASVATATLPAVPLDDIPADAGLERMLFEVVHRSLPHLRVLLRSIGSTAALVPDFFCAAALSVAAELGVPGYIFFPT
SITALYLMRRTVELHDFAAAGEYHALPDPLELPGGVSLRTAEFPEAFRDSTAPVYGQLVETGRLYRGAAGFLANSFY
ELEPAAVEDSKKAAEKGTFPPAYPVGPFVRSSSDEAGESACLEWLDLQPAGSVVFVSFGSFGVLSVEQTRELAAGLE
MSGHRFLWVVRMPSLNDAHRNGGHDEDPLAWVPDGFLERTRGRGLAVAAWAPQVRVLSHPATAAFVSHCGWNSTLES
VATGVPMIAWPLHSEQRMNAVVLEESVGMALRPRAREEDVGGTVVRRGEIAVAVKEVMEGEKGHGVRRRARELQQAA
GRVWSPEGSSRRALEVVAGKWKAAAQK
>LOC_Os02g56010.1
(SEQ ID NO: 47)
MASGDGAAQTTEDSRRRATTSTSTPTCSAATSRSASRSSRPLAPSRAPGRPRHPPRPTRRAHPASPRASWAEAARLE
RRRRRRATGQPKRRWPPGSSGGGARGGSSGGDSDGHQGGPSGGGDDSGGRAFLRAVLSLLAAAHTLANNIAINRPLG
FIDHTSTRSDDSGEREIVGDGRRRRRRPGRGDVPLAGVRPHDPLPPAVQAPRGEGPRRLLPLHAAKPRQAPAGAGEP
FRSSPPPAAADADTVEGLPEGAESTADVTPDKDGLVKKACDGLAAPFAAFLAGRAKRPDWIVVDFCHHWLPPIADEH
CVPCAMFHIIPAAMNAMFGPRWANARYPRTAPEDFTVPPKWIPFPSTIAFRRREFGWIAGAFKPNASGLPDVERFWR
TEERCRLIINSSCHELEPPQLFDFLTGLFRKPTVPAGILPPTTNLVTDDDDDDDRSEVLQWLDGQPPKSVIYVALGS
EAPLSANDLHELALGLELAGVRFLWAIRSPTAGGVLPDGFEQRTRGRGVVWGRWVAQVRVLAHGAVGAFLTHCGWGS
TIEGVALGQPLVMLPLVVDQGIIARAMAERGVGVEIARDESDGSFDRDAVAAAVRRVAVGGEREAFASNANRIKDVV
GDQEREERYIDELVGYLRRYS
>LOC_Os03g11350.1
(SEQ ID NO: 48)
MQSPENAAPRVYFIPFPTPGHALPMCDLARLFASRGADATLVLTRANAARLGGAVARAAAAGSRIRVHALALPAEAA
GLTGGHESADDLPSRELAGPFAVAVDLLAPLFADLLRRRPADAVVFDGVLPWAATAAAELRVPRYAFTGTGCFALSV
QRALLLHAPQDGVASDDEPFLVPGLPDAVRLTKSRLAEATLPGAHSREFLNRMFDGERATTGWVVNSFADLEQRYIE
HYEKETGKPVFAVGPVCLVNGDGDDVMERGRGGEPCAATDAARALAWLDAKPARSVVYVCFGSLTRFPDEQVAELGA
GLAGSGVNFVWVVGGKNASAAPLLPDVVHAAVSSGRGHVIAGWAPQVAVLRHAAVGAFVTHCGWGAVTEAAAAGVPV
LAWPVFAEQFYNEALVVGLAGTGAGVGAERGYVWGGEESGGVVVCREKVAERVRAAMADEAMRRRAEEVGERARRAV
EVGGSSYDAVGALLEDVRRREMAADPRNVKEV
>LOC_Os03g24430.1
(SEQ ID NO: 49)
MAAAHFVFVPLMAQGHLIPAVDTALLLATHGAFCTVVATPATAARVRPTVDSARRSGLPVRLAEFPLDHAGAGLPEG
VDNMDNVPSEFMARYFAAVARLREPVERHLLLRADEGGAPPPTCVVADFCHPWASELAAGLAVPRLTFFSMCAFCLL
CQHNVERFGAYDGVADDNAPVVVPGLARRVEVTRAQAPGFFRDIPGWEKFADDLERARAESDGVVINTVLEMEPEYV
AGYAEARGMKLWTVGPVALYHRSTATLAARGNTAAIGADECLRWLDGKEPGSVVYVSFGSIVHPEEKQAVELGLGLE
ASGHPFIWVVRSPDRHGEAALAFLRELEARVAPAGRGLLIWGWAPQALILSHRAAGAFVTHCGWNSTLEAATAGLPV
VAWPHFTDQFLNAKMAVEVLGIGVGVGVEEPLVYQRVRKEIVVGRGTVEAAVRSAMDGGEEGEARRWRARALAAKAR
AAAREGGSSHANLLDLVERFRPRHVAASEAANGTTAPPPPPRQ
>LOC_Os03g46400.1
(SEQ ID NO: 50)
MHTTNGAPACCDANADTPPLHLIFVPFLSRSHFGPVTAMAAEADACHRGGRTAATIVTTRHFAAMAPASVPVRVAQF
GFPGGHNDFSLLPGEVSAAAFFAAAEEALAPALGAAVRGLLREGGSTATVTVVSDAVLHWAPRVARECGVLHVTFHT
IGAFAAAAMVAIHGHLHLREAMPDPFGVDEGFPLPVKLRGVQVNEEALVHLPLFRAAEAESFAVVFNSFAALEADFA
EYYRSLDGSPKKVFLVGPARAAVSKLSKGIAADGVDRDPILQWLDGQPAGSVLYACFGSTCGMGASQLTELAAGLRA
SGRPFLWVIPTTAAEVTEQEERASNHGMVVAGRWAPQADILAHRAVGGFLSHCGWNSILDAISAGVPLATWPLRAEQ
FLNEVFLVDVLRVGVRVREAAGNAAMEAVVPAEAVARAVGRLMGDDDAAARRARVDELGVAARTAVSDGGSSCGDWA
ELINQLKALQLTSSRDRRTDAVTRD
>LOC_Os03g48740.1
(SEQ ID NO: 51)
MAHVLVVPYPSQGHMNPMVQFARKLASKGVAVTVVTTRFIERTTSSSAGGGGLDACPGVRVEVISDGHDEGGVASAA
SLEEYLATLDAAGAASLAGLVAAEARGAGADRLPFTCVVYDTFAPWAGRVARGLGLPAVAFSTQSCAVSAVYHYVHE
GKLAVPAPEQEPATSRSAAFAGLPEMERRELPSFVLGDGPYPTLAVFALSQFADAGKDDWVLFNSFDELESEVLAGL
STQWKARAIGPCVPLPAGDGATGRFTYGANLLDPEDTCMQWLDTKPPSSVAYVSFGSFASLGAAQTEELARGLLAAG
RPFLWVVRATEEAQLPRHLLDAATASGDALVVRWSPQLDVLAHRATGCFVTHCGWNSTLEALGFGVPMVAMPLWTDQ
PTNALLVERAWGAGVRARRGDADADDAAGGTAAMFLRGDIERCVRAVMDGEEQEAARARARGEARRWSDAARAAVSP
GGSSDRSLDEFVEFLRGGSGADAGEKWKTLVWEGSEAAASEM
>LOC_Os03g53350.1
(SEQ ID NO: 52)
MADAIGGGGRRRRLRVFFLPFFAKGHLIPMTDLACRMAAAGPEEMDATMVVTPGNAALIATAVTRAAARGHPVGVLC
YPFPDVGMERGVECLGVAAAHDAWRVYRAVDLSQPIHEALLLEHRPDAIVADVPFWWATDIAAELGVPRLTFSPVGV
FPQLAMNNLVTVRAEIIRAGDAAPPVPVPGMPGKEISIPASELPNFLLRDDQLSVSWDRIRASQLAGFGVAVNTFVD
LEQTYCHEFSRVDARRAYFVGPVGMSSNTAARRGGDGNDECLRWLSTKPSRSVVYVSFGSWAYFSPRQVRELALGLE
ASNHPFLWVIRPEDSSGRWAPEGWEQRVAGRGMVVHGCAPQLAVLAHPSVGAFVSHCGWSSVLEAASAGVPVLAWPL
VFEQFINERLVTEVVAFGARVRGGGRRSAREGEPETVPAEAVARAVAGIMARGGDGDRARARARVLAERARAAVGEG
GSSWRDIHRLIDDLTEATASPEPQLQ
>LOC_Os03g59030.1
(SEQ ID NO: 53)
MGDGGGGGLDVVVFPWLAFGHMIPYLELSKRLAARGHDVTFVSTPRNVSRLPPVPAGLSARLRFVSLPMPPVDGLPE
GAESTADVPPGNDELIKKACDGLAAPFAAFMADLVAAGGRKPDWIIIDFAYHWLPPIAAEHNAAAIAFLGPRWANAA
HPRAPLDFTAPPRWFPPPSAMAYRRNEARWVVGAFRPNASGVSDIERMWRTIESCRFTIYRSCDEVEPGVLALLIDL
FRRPAVPAGILLTPPPDLAAADDDDVDGGSSADRAETLRWLDEQPTKSVIYVALGSEAPVTAKNLQELALGLELAGV
RFLWALRKPAAGTLSHASAADADELLPDGFEERTRGRGVVWTGWVPQVEVLAHAAVGAFLTHCGWGSTIESLVFGHP
LVMLPFVVDQGLVARAMAERGVGVEVAREDDDEGSFGRHDVAAAVRRVMVEDERKVFGENARKMKEAVGDQRRQEQY
FDELVERLHTGGGEINDEKYC
>LOC_Os03g59350.1
(SEQ ID NO: 54)
MAAATADGHGGRRRLRVFFLPFFARGHLIPMTDLACLMAAASTDAVEVEATMAVTPANAAAIAATVAGNAAVRVVCY
PFPDVGLARGVECLGAAAAHDTWRVYRAVDLSRPAHESLLRHHRPDAIVADVPFWWATGVAAELGVPRLTFNPVGVF
PQLAMNNLVAVRPDIVRGGADGPPVTVPGMPGGREITIPVSELPDFLVQDDHLSMSWDRIKASQLAGFGVVVNTFAA
LEAPYCDEFSRVDARRAYFVGPVSQPSRAAAAAVRRGGDGDVDCLRWLSTKPSQSVVYVCFGSWAHFSVTQTRELAL
GLEASNQPFLWVIRSDSGDGGGERWEPEGWERRMEGRGMVVRGWAPQLAVLAHPSVGAFVTHCGWNSVLEAAAAGVP
ALTWPLVFEQFINERLVTEVAAFGARVWEDGGGKRGVRAREAETVPAGVIARAVAGFMAGGGGRRERAAAMATALAE
SARVAVGENGSSWRDIRRLIQDLTDATASQP
>LOC_Os04g04240.1
(SEQ ID NO: 55)
MEAEVASALVGTCMPCNQFVLSYQIVDSMIWLGIRDMINEFRKKKLKLRPVTYLSGAQGSGNDIPHGYIWSPHLVPK
PKDWGLKIDVVGFCFLDLASNYVPPEPLIKWLEAGDKPIYVGFGSLPVQDPAKMTEVIVKALEITGQRGIINKGWGG
LGTLAEPKDFVYLLDNCPHDWLFLQCKAVLLIMSSFHGVHHGGAGTTAAGLKAACPTTIVPFFGDQPFWGDRVHARG
VGPLPIPVDQFSLRKLVDAINFMMEPKVKEKAVELAKAMESEDGVSGVVRAFLRHLPLRAEETTPQPTSSFLEFLGP
FSFYDIFHVMALQAIVALYMCQYHLEASLSVSSRVIILVDPTAEGIC
>LOC_Os04g12669.1
(SEQ ID NO: 56)
MPHLADQPTISKYMESLWGMGVRVWQEKSGGIQREEVERCIREVMDGDRKEDYRRSAARLMKKAKEAMHEGGRQCGA
HVSTCRISITFPKPSGAARLPATKEGGRAYRSGDDGGGVDAGARRGDEAQRGGGARRLRGGGGGFQIGGDAGDGKER
GKGEKVMRTNMLIECRKSRVFVASRLHELMSEAKRHSLYFCRLGKQRAQLTVFGHMIHPFAEEAGDLRSWAFFNWMV
LVAIGALSNAITTIVSYLSAKSTCLNLR
>LOC_Os04g12678.1
(SEQ ID NO: 57)
MGSMSTPPPAAVTAANATSNVGDDNRGGGRVLLLPFPAAQGHTNPMLQFGRRLAYHGLRPTLVTTRYVLSTTPPPGD
PFRVAAISDGFDDDAGGMAALPDYGEYHRSLEAHGARTLAELLVSEARAGRPARVLVFDPHLPWALRVARDAGVGAA
AFMPQPCAVDLIYGEVCAGRLALPVTPADVSGLYARGALGVELGHDDLPPFVATPELTPAFCEQSVAQFAGLEDADD
VLVNSFTDLEPKEAAYMEATWRAKTVGPLLPSFYLGDGRLPSNTAYGFNLFTSTVPCMEWLDKQPPRSVVFVSYGTF
SGYDAAKLEEVGNGLCNSGKPFLWVVRSNEEHKLSRELREKCGKRGLIVPFCPQLEVLSHKATG
>LOC_Os04g12710.1
(SEQ ID NO: 58)
MASMNDQHGGATAHVLLVPLPAQGHMNPMLQFGRRLAYHGLRPTLVATRYVLSRSPPPGDPFRVAAFSDGFDAGGMA
SCPDPVEYCRRLEAVGSETLARVIDAKARAGRAATVLVYDPHMAWVPRVARAAGVPTAAFLSQPCAVDAIYGEVWAG
RVPLPMEDGGDLRRRGVLSVDLATADLPPFVAAPELYPKYLDISIVRISPL
>LOC_Os04g12720.1
(SEQ ID NO: 59)
MGSMSTPAASATTSNIEDNNNGGQVLLLPFPAAQGHTNPMLQFGRRLAYHGLRPTLVTTQYVLSTTPPPGDPFRVAA
ISDGFDDASGMAALPDPGEYLRTLEAHGSPTLAELLLSEARAGRPARVLVYDPHLPWARRVARAAGVATVAFLSQPC
AVDLIYGEVCARRLALPVTPTDASGLYARGVLGVELGPDDVPPFVAAPELTPAFCEQSVEQFAGLEDDDDILVNSFT
DLEPKEAAYMESTWRGKTVGPLLPSFYLDDGRLRSNTAYGFNLFRSTVPCMEWLDKQPPRSVVLVSYGTISTFDVAK
LEELGNGLCNSGKPFLWVVRSNEEHKLSVQLRKKCEKRGLIVPFCPQLEAIVNGIPLVAMPHWADQPTISKYVESLW
GTGVRVQLDKSGSLQREEVERCIREVMDGDRKEDYRRNAARLMKKAKESMQEGGSSDKNIAEFAAKYSN
>LOC_Os04g20540.1
(SEQ ID NO: 60)
MSTPKKHVLFPFTSKGHIAGFLSLASRLHRILPHATITLVSTPRNVAALRAAAAAPFLDFHALRFDPAEHGLPPGGE
SQDEIFPPLLIPLYEAFETLQPAFDDFVASTAAAAARVVVISDVFVAWTVEVARRHGSQVPKYMLYQYGLPAAGAAN
DGSGGRADRRFLDRQLAHGNNTDAVLVNAVAEPEPAGLAMLRRTLRVLPVWPIGPLSRDRRDAATEPTDDTVLRWMD
TQPPGSVLYISFGTNSMIRPEHMLELAAALESSGRCFLWKIKPPEGDVAGLNGGATTPSSYNRWLAEGFEERVRILA
HPSTAAFLSHCGWSSVLESMAHGVPVIGWLLTAEQFHNVMVLEGLGVCVEVARGNTDETVVERRRVAEVVKMVMGET
AKADDMRRRVQEVRTMMVDAWKEEGGSSFEASQAFLEAMKLK
>LOC_Os04g24840.1
(SEQ ID NO: 61)
MATARGARGATGDATATRRGSGGAQLEAAMGRDTGLGVDVTSTKSGTYGYQTDLGTWYLQDKVLEHDAVGVFLTHSG
WNSTLESPASGVLMLSWLFFAEQQTNCRYKQTEWGVAMEIGGEAWRGEVAAMTLEAMEGEKGREMRQRAEEWKQKAV
QVTLLGGPWDTNLDRVIHEVLLSCKDKTLSVNASASAQILALYELQKQQHKFLEQQHNFQMPQNFQKQQHQSSAVAI
SFQQQQQQQILANSTIKAGSLIFPLATPGAEDEDATQDIPALCQSTMTNCLGHLLALLARLKEWKEKAVRVTMPSGP
GDTNLDRIIHEVLLSCKGENGSGSVGSHPSHS
>LOC_Os04g24850.1
(SEQ ID NO: 62)
MGATGDKPPHAVCVPYPSQGDITPTLHLAKLLHARGFHVTLVNTEFNHRRLLASRGAAALDGVPGFVFAAIPDGLPA
MSGEHEDATQDIPALCQSTMTNCLGHLLALLSRLNEPASGSPPVTCLVADGLMSFAYDAASACGFVGCRLYRELIDR
GLVPLRDAAQLTDGYLDTVVDGAAARGMCDGVQLRDYPSFIRTTDLGDVMLNFIMREAERLSLPDAVILNTFDDLER
PALDAMRAVLPPPVYAVGPLHLHVRRAVPTGSPLHGVGSNLWKEQDGLLEWLDGHRPSSVVYVSYGSIAVMTSEQLL
EFAWGLADSGYAFVWVVRPDLVKGGEGDAAALPPEFHAAVEGRGVLPAWCPQEKVLEHDAVGVFLTHSGWNSTLESL
AAGVPMLSWPFFAEQQTNCRYKRTEWGIGMEIGGNARRGEVAAMIREAMEGKKGREIRRRAQEWKEKAVRVTLPGGP
GDTNLDRVIHDVLLSCKDKISRVNGESV
>LOC_Os04g25490.1
(SEQ ID NO: 63)
MGSFPAAEETTATAAARPHAVMVPYPAQGHVTPMLKLAVLLHARGFHVTFVNNEFNHRRLLRARGAGALDGAPGFRF
AAIDDGLPPSDADATQDVPALCHSVRTTCLPRFKALLAKLDEEADADAGAGAGDARRVTCVVADSTMAFAILAAREL
GLRCATLWTASACGEADLSNGHLDTKMDWIPGMPADLRLRDLPSVVRSTDRDDIMFNFFIDVTATMPLASAVILNTF
DELDAPLMAAMSALLPPIYTVGPLHLTARNNLPADSPVAGVGSNLWKEQGEALRWLDGRPPRSVVYGSITVMSAEHL
LEFAWGLAGSGYAFLWNVRPDLVKGDAAALPPEFAAATGERSMLTTWCPQAEVLEHEAVGVFLTHSGWNSTLESIVG
DVPMVCWPFFAEQQTNCRYKRTEWGIGAEIPDDVRRGEVEALIREAMDGEKGREMRRRVAELRESAVASGQQGGRSM
QNLDRLIDEVLLA
>LOC_Os04g25820.1
(SEQ ID NO: 64)
MATARGARGATGDATATRRGSGGAQLEAATGRDTGLGVDVTSTKSGTYGYQTDLGTCGVLRAWCPQDKVLEHDAVGV
FLTHSGWNSTLESPASGVPMLSWLFFAEQQTNCRYKQTEWGVAMEIGGEAWRGEVAAMTLEAMEGEKGREMRQRAEE
WKHKAVQVTLLGGPWDTNLDRVIHEVLLSCKDKTLRVNASASAQILALYELQKQQHKFLEQQHNFQMPQNFQKQQHQ
SSAVAISFQQQQQQQILANSTIKAGSLIFPLATPGAEDEDATQDIPALCQSTMTNCLGHLLALLARLKEWKEKAVRV
TMPSGPGDTNLDRIIHEVLLSCKGENGSGSLHYEKRNAWRKRLALFAPWS
>LOC_Os04g44240.1
(SEQ ID NO: 65)
MDCHRNESQRELEMGTKPHFVVIPWLATSHMIPIVDIACLLAAHGAAVTVITTPANAQLVQSRVDRAGDQGASRITV
TTIPFPAAEAGLPEGCERVDHVPSPDMVPSFFDAAMQFGDAVAQHCRRLTGPRRLSCLIAGISHTWAHVLARELGAP
CFIFHGFCAFSLLCCEYLHAHRPHEAVSSPDELFDVPVLPPFECRLTRRQLPLQFLPSCPVEYRMREFREFELAADG
IVVNSFEELERDSAARLAAATGKKVFAFGPVSLCCSPALDDPRAASHDDAKRCMAWLDAKKARSVLYVSFGSAGRMP
PAQLMQLGVALVSCPWPVLWVIKGAGSLPGDVKEWLCENTDADGVADSQCLAVRGWAPQVAILSHRAVGGFVTHCGW
GSTLESVAAGVPMAAWPFTAEQFVNEKLIVDVLGIGVSIGVTKPTGGMLTAGGGGGEETAEVGTEQVKRALNSLMDG
GVEGEERAKKVHELKAKAHAALEKEGSSYMNLEKLILSAV
>LOC_Os04g44250.1
(SEQ ID NO: 66)
METATSKPHFVLVPWIGSISHILPMTDIGCLLASHGAPVTIITTPVNSPLVQSRVDRATPHGAGITVTTIPFPAAEA
GLPEGCERLDLIPSPAMVPGFFRASRGFGEAVARHCRRQDARPRRRPSCIIAGMCHTWALGVARELGVPCYVFHGFG
AFALLCIEYLFKQRRHEALPSADELVDIPVLPPFEFKVLGRQLPPHFVPSTSMGSGWMQELREFDMSVSGVVVNIFE
DLEHGSAALLAASAGKKVLAVGPVSLPHQPILDPRAASDDARRCMAWLDAKEARSVVYVSFGSAGRMPAAQLMQLGM
ALVSCPWPTLWVFNGADTLPGDVRDWLRENTDADGVAHAHSKCLVVRGWAPQVAILDHPAVGGFMTHCGWGSTLESV
AAGMPMVTWPFFAEQFINERLIVDVLGIGVSVGVTRPTENVLTAGKLGGAEAKVEIGADQVKKALARLMDEGEDMRR
KVHELKEKARAALEEGGSSYMNLEKLIHSSV
>LOC_Os05g08480.1
(SEQ ID NO: 67)
MALSSPSSPPIKSRKPASSEDSVAMAAAPLHFVLVPLPAQGHVIPMMDMARLIAGHGGGGARVTVVLTPVMAARHRA
AVAHAARSGLAVDVSVLEFPGPALGLAAGCESYDMVADMSLFKTFTDAVWRLAAPLEAFLRALPRRPDCVVADSCSP
WTAGVARRLGVPRLVFHGPSALYILAVHNLARHGVYDRVAGDLEPFDVPDLPAPRAVTTNRASSLGLFHWPGLESHR
QDTLDAEATADGLVFNTCAAFEEAFVRRYAEVLGGGARNVWAVGPLCLLDADAEATAARGNRAAVDAARVVSWLDAR
PPASVLYVSFGSIARLNPPQAAELAAGLEASHRPFIWVTKDTDADAAAAAGLDARVVADRGLVIRGWAPQVTILSHP
AVGGFLTHCGWNSTVESLSHGVPLLTWPHFGDQFLNECLAVDVLGAGVRAGVKVPVTHVDAVNSPVQVRSGEVASAV
EELMGDGAAAAARRARARELAAEARAAMADGGSSARDLADMVWHVARRRDMVVVDPPPPPSPGGIAGGHGKMVSPSV
ASEVA
>LOC_Os05g08490.1
(SEQ ID NO: 68)
MNSLDDVPKPHFVLIPFMAQGHTIPMIDMAHLLAKHGAMVSFITTPVNAARIQSTIDRARELNIPIRFVPLRLPCAE
VGLLDGCENVDEILEKDQVMKMTDAYGMLHKPLVLYLQEQSVPPSCIVSDLCQPWTGDVARELGIPRLMFNGFCAFA
SLCRYLIHQDKVFENVPDGDELVILPGFPHHLEVSKARSPGNFNSPGFEKFRTKILDEERRADSVVTNSFYELEPSY
VDSYQKMIGKRGIFFIYNFFY
>LOC_Os05g08510.1
(SEQ ID NO: 69)
MARTVFLQLEEIALGLEASKRPFLWVIKSDNMPSETDKLFLPEGFEERTRGRGLIIQGWAPQALILSHPSVGGFVTH
CGWNSKIEGVSAGLPMITWPHCAEQFLNEELIMNALKVGLAVGVQSITNRTMKAHEISVVKRDQIERAVVELMGDET
GAEERRARAKELKEKARKAIDEGSSYNNIVLKNFRRCILRPLSKEKVGKIVGRKGTWKGNQG
>LOC_Os05g12450.1
(SEQ ID NO: 70)
MGGGRGGAPATASARARRPHQPRVLLLCSPCLGHLIPFAELARRLVADHGLAATLLFASARSPPSEQYLAVAASVLA
EGVDLVALPAPAPADALPGDASVRERAAHAVARSVPRVRDVARSLAATAPLAALVVDMIGAPARAVAEELGVPFYMF
FTSPWMLLSLFLHLPSLDADAARAGGEHRDATEPIRLPGCVPIHAHDLPSSMLADRSSATYAGLLAMARDAARADGV
LVNTFRELEPAIGDGADGVKLPPVHAVGPLIWTRPVAMERDHECLSWLNQQPRGSVVYVSFGSGGTLTWQQTAELAL
GLELSQHRFIWAIKRPDQDTSSGAFFGTANSRGEEEGMDFLPEGFIERTRGVGLLVPSWAPQTSILGHASIGCFLTH
CGWNSTLESVSNGVPMIAWPLYAEQKMNAAMMEVQAKVAIRINVGNERFIMNEEIANTIKRVMKGEEAEMLKMRIGE
LNDKAVYALSRGCSILAQVTHVWKSTVG
>LOC_Os05g42020.1
(SEQ ID NO: 71)
MASTDRSKKLRVLLIPFFATSHIGPFTDLAVRLVTARPDAVEPTIAVTPANVSVVRSALERHGSAATSVVSIATYPF
PEVAGLPRGVENLSTAGADGWRIDVAATNEALTRPAQEALISGQSPDALITDAHFFWNAGLAEELGVPCVSFSVIGL
FSGLAMRFVTAAAANDDSDSAELTLAGFPGAELRFPKSELPDFLIRQGNLDGIDPNKIPQGQRMCHGLAVNAFLGME
QPYRERFLRDGLAKRVYLVGPLSLPQPPAEANAGEASCIGWLDSKPSRSVLYVCFGTFAPVSEEQLEELALGLEASG
EPFLWAVRADGWSPPAGWEERVGERGVLVRGWVPQTAILSHPATAAFLTHCGSSSLLEAVAAGVPLLTWPLVFDQFI
EERLVTDVLRIGERVWDGPRSVRHEEAMVVPAAAVARAVARFLEPGGAGDAARLRAQELAAEAHAAVAEGGSSYRDL
RRLVDDMVEARAAGGEAAAAPQPQ
>LOC_Os05g42040.1
(SEQ ID NO: 72)
MASAERSKKLRVLLMPFFATSHIGPCTDLAVRLAAARPDVVEPTLAVTPANVSVVRSALRLHGSAASTVVSIATYPF
PEAAGLPPGVENLSTAGDERWRVDAAAFDEAMTWPAQEALIKDQSPDVLITDFHFSWNVGIAEELAMPCVQLNVIGL
FSTLAVYLAAAVVNDSDSEELTVAGFPGPELRIPRSELPDFLTAHRNLDLVDNMRKLVQVNTRCHGFAVNSFLFLDK
PYCEKFMCNGFAKRGYYVGPLCLPQPPAVASVGEPTCISWLDSKPNRSVVYICFGTFAPVSEEQLHELALGLEASGK
PFLWAVRAADGWAPPAGWEERVGDRGLLVRDWVPQTAILAHSATAAFLTHCGWNSVLEGVTAGVPLLTWPLVFEQFI
TERLVMDVLRIGERVWDGARSVRYKEAALVPAAAVARAVARFLEPGGAGDAARIRAQDFAAEAHAAVAEGGSSYGDL
RRLIDDLVEARADAGESALQPL
>LOC_Os05g42060.1
(SEQ ID NO: 73)
MASAERSKKLRILFIPFFATSHIGPFTDLAVRLAAARPDIVEPTIAVTPANVSVVRSAVKRHGSVASSMVSIAKYPF
PDVAGLSPGVENLSTAGDEGWRIDNAAFNEALTRPPQEAVIREQSPDVLITDSHFSWIVYIAEGLGMACFRFCVIGF
FSILAMRLLAGAAADANGSDSESLTAAGFPGPKLQIPRSEVPDFLTRQQNFDKFDMRKLQQSQDRCHGIVVNSFLFL
DKPYCEKFVCNGFAKRGYHVGPLCLPKPPAVGNVGEPSCISWLDSKPSRSVVYICFGTFAPVSEEQLHELALGLEAS
GKPFLWAVRAADGWAPPAGWEERVGDRGLLVRDWVPQTAILAHSATAAFLTHCGWNSMLEGATAGVPLLTWPLVFEQ
FITERFVTDVLRIGERVWDGPRSVRYEEKAVVPAAAVARAVARFLEPGGTGDAARIRAQELAAEAHAAVAEGGSSYD
DLRRLIDDMVEARAAAGGVAPARQPQ
>LOC_Os05g42070.1
(SEQ ID NO: 74)
MASDGSSKKLRVVLIPFFATSHIGPFTDFAVRLAAAWPDAVEATLAVTPANVPVVRSLLERHGPAGAGSVAIATYPF
PAVDGLPAGVENLSKAAPGDAWRINAVADDEALMRPAQESLVRELRPDVIVTDAHFFWNAGLADELGVPCVQFYAIG
AFSTIAMAHLVGAVKEGAKEAAGKPFLWVVRTDMWAPPDGWKERVGDRGMVIRGWAPQKAILAHPSVGAFVTQCGWN
SVLEAVSAGVPVLTWPMVFEQLDFSHFGPFEKLISQIDP
>LOC_Os05g45140.1
(SEQ ID NO: 75)
MKKTMVLYPGLSVSHFLPMMQFADELIDRGYAITVALIDPVFQQHIAFPATVDRAISSKPAIRFHRLPRVELPPAIT
TKDNDFSLLGYLDLVRRHNECLHDFLCSMPPGGAHALVVDPLSVEALDVAKRLNVPGYVFHPGNASAFAIHLQLPLI
RAEGQPSFRELGDTPLELPGLPPIPVSYLYEELLEDPESEVYKAIVDLFHRDIQDSNGFLMNTFESLEARVVNALRD
ARRHGDPAALPPFYCVGPLIEKAGERRETAERHECLAWLDRL
>LOC_Os05g45150.1
(SEQ ID NO: 76)
MFQRDSRCHHGGPALPPFYCIRPLVEKADERRDRAERHECLAWLDRQPERSVVFLCFGSTGAGSHSVEQLREIAVGL
EKSGQRFLWVVRAPRVAIDDDDDSFNPRAEPDVDALLPAGFLERTTGRGVVVKLWAPQVDVLYHRATGAFVTHCGWN
SVLEGITAGVPMLCWPLHSEQKMNMVLMVEEMDIAVEMAGWKQGLVTAEELEAKVRLVMESEAGSQLRARVTAHKEG
AATAWADGGSSRSAFARRGKRKWEAPHCGAIARREDGEPEPKLCRPAAPTLPFPALLRHLPCSPRSPSAQPPLCRGL
DRHPLSCLSSLRSGPPSATTFIFTTSRAHLSATIVIGAAIPTANFAVGVHGYGSEDLVGGSGCTDLERIGECYGGVG
GDQGWQCGGGDERGGGMEREEKNRREGEEGLKKGSEPNIWDSLFRLDSVIESLLE
>LOC_Os05g45170.1
(SEQ ID NO: 77)
MKKTIVLYPGVAVSHFLPMMQLADELVDHGYAVAVALIDPAFQQHTAFPATVDRVVSSKPTVRFHRLPRVELPPATA
TDDGDFLLLGYLDLVRRHNECLHDFLCSMLPGGVHAFVVDSLSVEALDVGERLNVPGFVFHPANLGAFAIFLQLPSI
RAEGEPSFRELGDNPLELPGLPPMPASHLFSQFLEHPESQVYKAMMNVSRRMLPTWKRSKIFSENQREFGRRGEETE
RKTEM
>LOC_Os05g45180.1
(SEQ ID NO: 78)
MKKTMVLYPGLSVSHFLPMMKLADELVEHGYAVTVALIDDPLQKQIAFTATVDRVISSKPSICFHRLPRVDHLPAVT
TNDGEFYLPGYLDLVRRHNEPLHGFLSSHFRGGIQALVVDMMSVEALDIAERLKVPGYLFHPSNASLFAFFLQIPSI
CAESKRSFSELGDTPLEIPGLPPMPASHFIDNRPEEPPESEVYKAVMDLVRRYTNKCSNGFLVNTVDSLEARVVNTL
RHARRQGGRALPPFYCVGPLVNKAGERGERPERHECLAWLDRQPDRTVVFLCFGSTGIGNHSTEQLREIAVGLEKSG
HRFLWVVRAPVVSDDPDRPDLDALLPAGFLERTSGQGAVVKQWAPQVDVLHHRATGAFVTHCGWNSVLEGITAGVPM
LCWPLHSEQKMNKVLMVEEMGIAVEMVGWQQGLVTAEEVEAKVRLVMESEAGVELRARVTAHKEAAAVAWTDVGSSR
AAFTEFLSNADSRQTS
>LOC_Os05g45180.2
(SEQ ID NO: 79)
MKKTMVLYPGLSVSHFLPMMKLADELVEHGYAVTVALIDDPLQKQIAFTATVDRVISSKPSICFHRLPRVDHLPAVT
TNDGEFYLPGYLDLVRRHNEPLHGFLSSHFRGGIQALVVDMMSVEALDIAERLKVPGYLFHPSNASLFAFFLQIPSI
CAESKRSFSELGDTPLEIPGLPPMPASHFIDNRPEEPPESEVYKAVMDLVRRYTNKCSNGFLVNTVDSLEARVVNTL
RHARRQGGRALPPFYCVGPLVNKAGERGERPERHECLAWLDRQPDRTVVFLCFGSTGIGNHSTEQLREIAVGLEKSG
HRFLWVVRAPVVSDDPDRPDLDALLPAGFLERTSGQGAVVKQWAPQVDVLHHRATGAFVTHCGWNSVLEGITAGVPM
LCWPLHSEQKMNKVLMVEEMGIAVEMVGWQQGLVTAEEVEAKVRLVMESEAGVELRARVTAHKEAAAVAWTDVGSSR
AAFTEFLSNADSRQTS
>LOC_Os06g10860.1
(SEQ ID NO: 80)
MAVATPTSTISPAARGKSAAIDADECIQWLDSKDPSSVIYVSFGSIARTDPKQLIELGLGLEASAHPFIWMVKNAEL
YGDTAREFFPRFEISGVDTVNADPVARHGRWLRDALRVNSIMEVVATRLPMVTWPHSVDQLLNQKMAVEVLGIGVGV
GLDESVTEGHCGGEGGGGEGNREHT
>LOC_Os06g11710.1
(SEQ ID NO: 81)
MAPAPATLPNAAARRPHALLVPFPSSGFINPMFHFARLLRSAGFVVTFVNTERNHALMLSRGRKRDGDGIRYEAIPD
GLSPPERGAQDDYGFGLLHAVRANGPGHLRELIARLNTGRGGGAGDSPPPPVTCVVASELMSFALDVAAELGVAAYM
LWGTSACGLAVRELRRRGYVPLKETQVNAGAHNPLAPYEHL
>LOC_Os06g11720.1
(SEQ ID NO: 82)
MCDSPSSSSCSSLSLALAMGERMRRAAHAMLFPFPCSGHINPTLKLAELLHSRGVHVTFVNTEHNHERLLRRRGGGG
ALRGREGFRFEAVPDGLRDDERAAPDSTVRLYLSLRRSCGAPLVEVARRVASGGGVPPVTCVVLSGLVSFALDVAEE
LGVPAFVLWGTSACGFACTLRLRQLRQRGYTPLKDESYLTNGYLDTPIDWIAGVPTVRLGDVSSFVRTLDPTSFALR
VEEDEANSCARAQGLILNTFDDLESDVLDALRDEFPRVYTVGPLAADRANGGLSLWEEDAACMAWLDAQPAGSVLYV
SFGSLTVMSPEELAELAWGLADTRRTFLWVIRPGLIAGAGAGDHDVVTNALPDGFVAETKGRCFIAEWCAQEEVLRH
RAVGGFLTHSGWNSTTESICAGVPMICWPGFADQYINSRYVRDEWGIGLRLDEELRREQVAAHVEKLMGGGGGGGDR
GKEMRRNAARWKAAAEAATAKGGSSYGGLDKLVEQLRLGQ
>LOC_Os06g16000.1
(SEQ ID NO: 83)
MAKGHAMPLLHLTRLLLARGLASKVTFFTTPRDAPFIRASLAGAGAAAVVELPFPTDDGLNDGAAPPQSMDDELASP
SQLADVVAASAALRPAFAAAFARLEPRPDVLVHDGFLPWAELAAADAGGVPRLVSYGMSAFATYVAGAVTAHKPHAR
VGSPSEPFEVDGLPGLRLTRADLNPPIDEPEPTGPLWDLACETKASMDSSEGIIVNSFVELEPLCFDGWSRMSPVKL
WPVGPLCLASELGRNMDRDVSDWLDSRLAMDRPVLYVAFGSQADLSRTQLEEIALGLDQSGLDFLWVVRSKWFDSED
HFENRFGDKGKVYQGFIDQVGVLSHKSIKGFFSHCGWNSVLESISMGVPILAFPMAAEQKLNAKFVVDMLRVGLRVW
PQKREDDMENGLVAREEVQVMARELIFGEEGKWASTRVSELAVLSKKAMEIGGSSYKKLEEMVHEISELTRDKSM
>LOC_Os06g17110.1
(SEQ ID NO: 84)
MVIRGWAPQLAALRHRAVGWFVTHSGWISVVEAVAAGVAMLTWPMVADQFVNARLVVDELRAAVPVSWGGVAVPPSA
NEVARVLEATVLAADGGEVGARVEELAVEAAAATREGGSSWVEVDELVRELGGHMQR
>LOC_Os06g18790.1
(SEQ ID NO: 85)
MMSLCSYFPIYLDNKDAQADVGDVDVPGVRHLQRSWLPQPLLDLDMLFTKQFIENGREVVKTDGVLINTFDALEPVA
LAALRDGTVVRGFPPVFAVGPYSSLASEKKAADADQSSALAWLDQQPARSVVYVAFGNRCTVSNDQLREIAAGLEAS
GCRFLWILKTTVVDRDEAAAGGVRDVLGDGFMERVKGRGMVTKEWVDQEAVLGHPAVGLFLSHSGWNSVTEAAAAGV
PLLAWPRGGDHRVAATVVASSGVGVWMEQWSWDGEEWLVSGEEIGGKVKEMMADDAVRERAAKVGEEAAKAVAEGGT
SHTSMLEFVAKLKAA
>LOC_Os06g23560.1
(SEQ ID NO: 86)
MAAARRVVLFPSLGVGHLAPMLELAAVCIRHGLAVTVAVPDPATTAPAFSAALRKYASRLPSLSVHPLPPPPHPPAS
SGADAAAHPLLRMLAVLRAHAPALGDLLRGPHAARALVADMFSVYALDVAAELGVPGYLLFCTGATNLAVFLRLPRF
CAGSSGSLRELGDAPVSFPGVRPLPASHLPEEVLDRGTDISAAMLDAFDRMADARGILVNTFDALEGPGVAALRDGR
CLSNRATPPVYCVGPLITDGGAEEERHPCLAWLDAQPERSVVFLCFGSRGALSPEQVSEMATGLERSEQRFLWALRA
PAGTKPDAAMSLLPDGFLARTADRGVVVTASWVPQVAVLQHASTGAFVTHCGWNSTLEAVAAGVPMVCWPLDAEQWM
NKVFIVEEMKIGIEVRGYKPGALVQADIVDAILRRIMESDAQQGVLERVMAMKESAAAAWKEGGSSCTAFAEFLKDM
EEGNVAMAHSNQVET
>LOC_Os07g10160.1
(SEQ ID NO: 87)
MAASASSSSPLHIVMFPWLAFGHMIPFLELAKRLARRGLAVTFVSTPRNAARLGAIPPALSAHLRVVPLDLPAVDGL
PEGAESTADAPPEKVGLLKKAFDGLAAPFAGFVAEACAAGHGESTPTAAGFSRKPDWIILDFAQNWVWPIAEEHKIP
CAMFSIFPAAMVAFVGPRQENLAHPRTKTEHFMVQPPWIPFPSNVAYRRRHGAEWIAAVFRPNASGVSDADRFWEME
HACCRLIIHRSCPEAEPRLFPLLTELFAKPSVPAGLLMPPPPPAAGVDDDDDDVSMDDQHIAMAMRWLDEQPERSVI
YVALGSEAPLTVGHVRELALGLELAGVRFLWALRAPPSASSVNRDKCAADADLLLPDGFRSRVAAARGGLVCARWVP
QLRILAHRATGGFLTHCGWSSIFESLRFALPLVMLPLFADQGLGVQALPAREIGVEVACNDDGSFRRDAIAAAVRQV
MVEEKGKALSRKAEELRDVLGDEGRQEMYLDELVGYLQRYK
>LOC_Os07g10190.1
(SEQ ID NO: 88)
MAATSDSTPAAAAAAAASSSSSPLHIVVFPWLAFGHMIPFLELSKRLASRGHAVTFVTTPRNAARLGATPPAPLSSS
SRLRVVPLDLPAVDGLPEGAESTADVPPEKVGLLKKAFDGLAAPFARFVAEACAAGDGEAVTAAAGFLRKPDWIIPD
FAHSWIWPIAEEHKIPYATFLIVPAALVAILGPRRENLTHPRTTAEDYMVQPPWIPFPSNIAYRRRHEAEWMVAAFR
ANASGVSDMDRFWESEQHPNCRLIIYRTCPEIEPRLFPLLTELYTKPAIPSGLLVPPALDDNDIGVYNRSDRSFVAV
MQWLDKQPNKSVIYVSLGTEAPITADHMHELAFGLELAGVRFLWALRRPSGINCHDDMLLPSGFETRVAARGLVCTE
WVPQVRMLAHGAVGVFLTHCGWGSTVESFHYGQPLVMLPFIADQGLIAQAVAATGVGVEVARNYDDGSFYRDDVAAA
IQRVMVEEEGKELAHKAIELCGILGDRVQQEMYLYELIGYLQCYK
>LOC_Os07g10230.1
(SEQ ID NO: 89)
MKQSGSLLHSSLTPLECPMLTVCWKWNAPAAALSSCPEAEPRLFPLLNKLFARPAVPASLLLPADIVHDEDAPNTTS
NQSFVSAIQWLDKQPNGSVIYVALGSEAPITTNHVRELALGLELSGVRFLWALRPPSGINSQTGTFLPSGFESRVAT
RGIVCTEWVPQVRVLAHGAIGAFLTHCGWGSTVESFCFGHPLVMLPFVADQGLIAQAMAARGIGVEVARNYDDGSFY
RDDVAAAVRRVMVEEEGKVLARKAKEVHSILGDRAREEQYLDEFVGYLQRYK
>LOC_Os07g10240.1
(SEQ ID NO: 90)
MAINGVAGAGAGDVDVDVDVDASAPPPPLHLVMFPWLAFGHLIPFLQLAKRLAARGHAAVTFLATPRNASRLAALPP
ELAAYVRVVSLPLPVLDGLPEGAESTADVPPEKVELLKKAFDGLAAPFAAFLADACAAGDREGRPDPFSRRPDWVVV
DFAHGWLPPIADEHRVPCAFFSIYSAAALAFLGPKAAHDAHPRTEPEDFMSPPPWITFPSTIAFRRHEAAWVAAAAY
RPNASGVSDIDRMWQLHQRCHLIVYRSCPDVEGAQLCGLLDELYHKPVVPAGLLLPPDAAGDDDDGHRPDLMRWLDE
QPARSVVYVALGTEAPVTADNVRELALGLELAGARFLWALRDAGERLPEGYKARVAGRSVVEAGWVPQVRVLAHAAV
GAFLTHCGWGSTVESLRFGGLPLVMLPFIADQGLIARAMADRGLGVEVARDDDGDGSFRGEDVAAAVRRVMAEEEGK
VFARNAREMQEALGDGERQDRYVDELAERLRRRRSLS
>LOC_Os07g13780.1
(SEQ ID NO: 91)
MASASVVGGGARHGGERRRRVLVFPLPFQGHTNPMLQLAGALHGRGGLCVTVLHTRFNALDPSRHPELAFVEVADGI
PPDVAARGRVAEIILAMNAAMEATEDESGAASPSNIREVLASVVAAGEGQPSVACLVIDSHLLAVQKAAAGLGIPTL
VLRTGSAACLRCYLAYDMLLQKAICLPKVRTKQSHIFIHPRLKL
>LOC_Os07g13810.1
(SEQ ID NO: 92)
MATQEREPERQPHAGRRVALFPLPFQGHLSPMLQLADLLRARGLAVTVLHTRSNAPDPARHRHGPDLAFLPIHEAAL
PEEATSPGADIVAQLLALNAACEAPFRDALASLLPGVACAVVDGQWYAALGAAARLGVPALALRTDSAATFRSMLAF
PRLRDAGFIPIQGERLDEAVPELEPLRVRDLIRVDGCETEALCGFIARVADAMRDSASGVVVNTFDAIEASELGKIE
AELSKPTFAVGPLHKLTTARTAAEQYRHFVRLYGPDRACLAWLDAHPPRSVLYVSLGSVACIDHDMFDEMAWGLAAS
GVPFLWVNRPGSVRGCMPALPYGVDVSRGKIVPWAPQRDVLAHPAIGGFWTHCGWNSTLESVCEGVPMLARPCFADQ
TVNARYVTHQWGVGLELGEVFDRDRVAVAVRKLMVGEEGAAMRETARRLKIQANQCVAATLAIDNLVKYICSL
>LOC_Os07g13940.1
(SEQ ID NO: 93)
MTGARRHCRRVVMFPFPFRSHIAPMLQLAELLRGRGLAVTVVRTTFNAPDAARHPELIFVPIHERLPDAATDPGTDL
VEQMLALNAACEAPFREALRRVWYWYAALTAAAEVGVAALALRTDNAAALHCMLSYSRLRYSGYLPIKGKLFPESRD
EVLPPVEPLRGRDLIRVDGGDAERVREFIARVDNAMRTAAMGFVINTFRAIEKPVLRNIRRHLPRIPAFAIGPMHRL
LGAPEEHGLHAPDSGCVAWLHAHSPRSVLYVSLGSVARIDREVFDEMALGLAGSGVPFLWVIRPGFVTGIVSDALPL
TEPLTAVVDNGMGKPCFGDQTVNARYVTHQWGVGLELGEVFDRDRVAEAVRKLMVGEEGAAMRDKARGLKAKASKSV
EDDGASNAAIDRLVRYMVSF
>LOC_Os07g42970.1
(SEQ ID NO: 94)
MASPAASKPHVVLIPYPAQGHVTFVHTEFNRARLLRSRGAAAVAGADGLPPPGQPAELDATQDIWAICEATRRTGPG
HVRALVERLGREAAAGGVPPVSFVVADGAMGFAVHVTKEMGIPTYLFFTHSACGLLAYLNFDQLVKRGYVPLKYESC
LTNGYLDTRLDWVAGMIAGVRLRDLPTFIRTTDPDDVMLNITMKQCELDAPAADGILLNTFDGLERAALDAIRARLP
NTIAREDGRCAAWLDAHADAAVVYANFGSITVMGRAQVGEFARGLAAAGAPFLWVIRPDMVRDAGDGDGEPLLPEGF
EEEVVASGSGRGLMVGWCDQEAVLGHRATGAFLSHCGWNSTVESLAAGVPMLCWPFFSEQVTNCRYACEEWGVGVEM
ARDAGRREVEAAVREVMGGGEKAAAMRRKAAAAVAPGGSSRRNLESLFAEIAGGVQPIGLCQFIRGNCDIVGVKNGN
EDKSILEIDKVTTVASLSTGTLPTTESTEPLNLGKFRTGASLSTDIHIAKWDICRFGFMGRAASV
>LOC_Os08g07170.1
(SEQ ID NO: 95)
MARPHAVVVPYPGSGNINPALQLAKLLHGHGIYITFVNTEHNHRRALAAEGAAAVRGRDGFQFETIPDGLLDADRDA
ADYDLGLSVATSHRCAAPLRDLVARLNGAAAGSADGGGGAPPVTCMVLTALMSFALDVARGLGLPTMVLWGGSAASL
MAHMRIRELRERGYIPLKASGSDQFFRLLLKPEETMSVEKSVQYNQASDQFIFMNNNGLKNDK
>LOC_Os08g07180.1
(SEQ ID NO: 96)
MARPHAVVVPYPGSGNINPALQLAKLLHGHGVYITFVNTEHNHRRIVAAEGAGAVRGRDGFRFEAIPDGMADADHDI
GNYDLALSAATSNRCAAPLRELLARLDDGGAGAPPVTCVVVTALMSFALYVARELGLPTMVLWGSSAAALVTQMRTR
ELRERGYIPLKGNEIKDDRDRTV
>LOC_Os08g07200.1
(SEQ ID NO: 97)
MSSSLSLLLLPPSLSLPSLFLSRGAIGRQGQRRRQRARAGAASGKQRRQRAAETWSWRGSPRAAEMQEWHDVVDDDG
GAQPLADESLLTNGHLDTTIIDWIPGMPPISLGDISSFVRTTDADDFGLRFNEDEANNCTMAGALVLNTFDGLEADV
LAALRAEYPRIFTVGPLGNLLLNAAADDVAGLSLWKQDTECLAWLDAQEMGAVVYVNFGSLTVLTPQQLAEFAWGLA
ATGRPFLWVIRENLVVPGDGGGDALLPTGFAAATEGRRCVATWCPQDRVLRHRAVGCFVTHSGWNSTCEGVAAGVPM
VCWPVFADQYTNCKYACEAWGVGVRLDAEVRREQVAGHVELAMESEEMRRAAARWKAQAEAAARRGGSSYENLQSMV
EVINSFSSKA
>LOC_Os08g07270.1
(SEQ ID NO: 98)
MPPIKLGDMSSFVRTTDPDDFGLRFNEEEANNCTKANALILNTFDELEADVLAALRAEYARIYTIGPLGTLLNHAAD
AIGGGLSLWKQDTECLAWLDTQQPRSAVENLVPGGPNALPPEFVVETDGRRCLATWCSQEQVLRHPAVGCFLTHSGW
NSKCESVASGVPMVCWPVFADQYINRKYACESWDVGLRLDEEVRREQVTAQVKQVMESEEMRQDAARWKAKAEQAAR
LGGSSYKNLQSVVEVIRSFASDSKKAEA
>LOC_Os08g15330.1
(SEQ ID NO: 99)
MTHIWWASVMEGVSSGVPMVCRPFFGNQKMNALLVSHVWGFGMAFDRVMTCDGVATVVVSLVGGKDGCRMRARAQEL
QAKVATMFIEPNGNCRKNFARLVEIICAS
>LOC_Os09g21170.1
(SEQ ID NO: 100)
MSALRPRLEASLAAARPRVGLLVADALLYWAHDAAAGLGVPTVAFYATSMFAHVIRDVILRDNPAAALVAGGAGATF
AVPEFPHVRLTLTDIPVPFNDPSPAGPLIEMDAKMANAIAAHYIEHWDCHHVGHRAWPVGPLCLARQPCRAAGDSAA
AIKPSWMRWLDEMAAAGRAVLYVALGTLNAEPHAQLRELAGGLEASGVDFLW
>LOC_Os09g30980.1
(SEQ ID NO: 101)
MKKTVVLYPGLAVGHFNPMMVLADVFLDHGYAVAVALINPSVKDDDAAFTAAVARAVSSKSSATVSFHMLPRIPDPP
SLAFDDDKFFTNYFDLVRRYDEHLHDFLCSVQGLHAVVVDASCGFAIQAVRKLGVPAYELYPCDAGALAVNIQIPSL
LAGFKKLGGGEEGSAPLELLGVPPMSASHVTDLFGRSLSELISKDPEATTVAAGARVMAEFDGILINTFVSLEERAL
RALADPRCCPDGVVLPPVYAVGPLVDKAAAGAGDETSRRHESLVWLDGQPDRSIVFLCFGSIGGNHAEQQLREIAAG
LDKSGHRFLWVVRRAPSTEHLDALLPEGFLARTSGRGLVVNTWVPQPSVLRHRATAAFVTHCGWNSVLEGITAGVPM
LCWPMYAEQRINKVLMVDDMGVGVEMEGWLEGWVTAEEVEAKVRLVVESEHGRKLRERVEAHRDGAAMAWKDGGSSR
VAFARLMTELDNAQR
>LOC_Os10g07970.1
(SEQ ID NO: 102)
MMPRRPTRRRASPRPTLPSRSASCRRRPRPARTPARTVSGAASTRSGSPTRCSWSSSARCRPLSTRSCSTCSASTRS
TSRPSSPSPHTSSSPPRQAPSPSSSTSRITTPTGRHSGRWDKESETTKIRLYQFKRMMEGKGVLVNSFDWLEPKALK
ALAAGVCVPDKPTPSVYCVGPLVDTGNKVGSGAERRHACLVWLDAQPRRSVVFLSFGSQGALPAAQLKEIARGLESS
GHRFLWVVRSPPEEQATSPEPDLERLLPAGFLERTKGTGMVAKNWAPQAEVVQHEAVGVFVTHCGWNSTLEAIMSAL
PMICWPLYAEQAMNKVIMVEEMKIAVPLDGYEEGGLVKAEEVEAKVRLVMETEEGRKLREKLVETRDMALDAVKEGG
SSEVAFDEFMRDLEKSSLENGVCS
>LOC_Os10g09990.1
(SEQ ID NO: 103)
MAAASAAKELHFLLVPLVAQGHIIPMVDLARLLAGRGARVTVVTTPVNAARNRAAVEGARRGGLAVELAEITFTGPE
FGLPEGVENMDQLVDIAMYLAFFKAVWNMEAALEAYVRALPRRPDCVVADACNPWTAAVCERLAIPRLVLHCPSVYF
LLAIHCLAKHGVYDRVADQLEPFEVPGFPVRAVVNTATCRGFFQWPGAEKLARDVVDGEATADGLLLNTFRDVEGVF
VDAYASALGLRAWAIGPTCAARLDDADSSASRGNRAVVDAARIVSWLDARPPASVLYVSFGSLTHLRATQAIELARG
LEESGWPFVWAIKEATAAAVSEWLDGEGYEERVSDRGLLVRGWAPQVTILSHPAAGGFLTHCGWNATLEAISHGVPA
LTWPNFSDQFSSEQLLVDVLRVGVRSGVTVPPMFLPAEAEGVQLTSDGVVKAVTELMDGGDEGTARRARAKELAAKA
RAAMEEGGSSHADLTDVIGYVSEFSAKKRQERDAGETAQQPPPSPAELGDISGDKVEADPALSVQS
>LOC_Os10g12120.1
(SEQ ID NO: 104)
MLAVCRHLVAADAALSVTVVVTEEWHALLESAGVPAALPDRISFATIPNVIPSEHGRGADHIGFIVAVHTRMAAAVE
WLLDRLLLEQKWRPDAIVADTYLAWGVAVGARRGIPVCSLWTMAATFFWALYHFNLWPPVDGSESEQELSCRSLEQY
VPGLSSVRLSDIKTFRASWERPMKIAEEALVNVRKAQCILFTSFHELEPEIINRIAETVPCPIYPIGPSIPHLPRNG
DDPGKIGNDDHHSWLDARQENSVLYVSFGSYVTSESNHKN
>LOC_Os10g17489.1
(SEQ ID NO: 105)
MAAAAAAAADHDAAPRAHALILPYPAQGHVIPLMELAYCLIDRGFAVTFVNTEHNHRRVVAAAAGAGGVQAPGSRAR
RLRLVAVADGMGDGDDRDNLVRLNAVMEEAIPPQLEPILDGAGGEGQLGKVTCVVVDVGMSWALDAVKRRGLPGAAL
WAASAAVLAVLLGAQKLIRDGVIDDDGAPLKLENNSFRLSEFTPPMDATFLAWNFMGNRDAERMVFHYLTSSARAAA
AKADILLCNSFVELEPAIFTLKSPATILPIGPLRTGQRFAHQVEVVGHFWQTNDDTCLSFLDEQPYGSVVYVAFGSL
TIMSPGQLKELALGLEASGHPFLWVVRPGLAGNLPTSFLDATMGQGKGIVVEWAPQEQVLAHPAVGCFVTHCGWNST
VESIRNGVPMLCWPYFTDQFTNQIYICDIWRIGLKMVQTCGEGIVTKEIMVERLKELLLDEGIKERVQRLKEFAETN
MSEEGESTSNLNAVVELMTRPMS
>LOC_Os10g30570.1
(SEQ ID NO: 106)
MGQQQPQDAVAANGNGGGKRPHAVVIPYPLQGHVIPAVHLALRLAARGFAVTFVNTESVHRQITSSGGGHGVGGGDD
IFAGAGGGAMIRYELVSDGFPLGFDRSRNHDQYMEGVLHVLPAHVDELLRRVVGDGDAAAATCLVADTFFVWPATLA
RKLGVPYVSFWTEPAIIFSLYYHMDLLTKNGHFNCKAAPSSSSLPSPILPHASILDADSIPRILSLTGDSMEVDEVM
GSSESEKSARRDAVTVARLMLS
>LOC_Os04g35030.1
(SEQ ID NO: 107)
MAAASGEKEEEEKKLQERAPIRRTAWMLANFVVLFLLLALLVRRATAADAEERGVGGAAWRVAFACEAWFAFVWLLN
MNAKWSPARFDTYPENLAGRCGAAHRPRKSSCISGHLDLMRRQCALMQDRRAAGGRHVRDDGGPGARAAGGDGEQGA
LAARRRLLPGRRRRRRRRRLACYVSDDGCSPVTYYALREAAGFARTWVPFCRRHGVAVRAPFRYFASAPEFGPADRK
FLDDWTFMKSEYDKLVRRIEDADETTLLRQGGGEFAEFMDAKRTNHRAIVKVIWDNNSKNRIGEEGGFPHLIYVSRE
KSPGHHHHYKAGAMNALTRVSAVMTNAPIMLNVDCDMFANDPQVVLHAMCLLLGFDDEISSGFVQVPQSFYGDLKDD
PFGNKLEVIYKKLLGGVAGI
>LOC_Os06g39970.1
(SEQ ID NO: 108)
MDGESPEIMPVECPDPEPASSESGDDHDIPEPLSSRLSVPSGELNLYRAAVALRLVLLAAFFRYRVTRPVADAHALW
VTSVACELWLAASWLIAQLPKLSPANRVTYLDRLASRYEKGGEASRLAGVDVFVAAADAAREPPLATANTVLSVLAA
DYPAGGVACYVHDDGADMLVFESLFEAAGFARRWIPFCRRHGVEPRAPELYFARGVDYLRDRAAPSFVKDRRAMKRE
YEEFKVRMNHLAARARKVPEEGWIMSDGTPWPGNNSRDHPAMIQVLLGHPGDRDVDGGELPRLFYVSREKRPGFRHH
GKAGAMNALLRVSAVLTNGAYVLNLDCDHCVNNSSALREAMCFMMDPVAGNRTCFVQFALRDSGGGDSVFFDIEMKC
LDGIQGPVYVGSGCCFSRKALYGFEPAAAADDGDDMDTAADWRRMCCFGRGKRMNAMRRSMSAVPLLDSEDDSDEQE
EEEAAGRRRRLRAYRAALERHFGQSPAFIASAFEEQGRRRGGDGGSPDATVAPARSLLKEAIHVVSCAFEERTRWGK
EIGWMYGGGVATGFRMHARGWSSAYCSPARPAFRRYARASPADVLAGASRRAVAAMGILLSRRHSPVWAGRRLGLLQ
RLGYVARASYPLASLPLTVYCALPAVCLLTGKSTFPSDVSYYDGVLLILLLFSVAASVALELRWSRVPLRAWWRDEK
LWMVTATSASLAAVFQGILSACTGIDVAFSTETAASPPKRPAAGNDDGEEEAALASEITMRWTNLLVAPTSVVVANL
AGVVAAVAYGVDHGYYQSWGALGAKLALAGWVVAHLQGFLRGLLAPRDRAPPTIAVLWSVVFVSVASLLWVHAASFS
APTAAPTTEQPIL
>LOC_Os07g36610.1
(SEQ ID NO: 109)
MALSPAAAGRTGRNNNNDAGLADPLLPAGGGGGGGKDKYWVPADEEEEICRGEDGGRPPAPPLLYRTFKVSGVLLHP
YRLLTLVRLIAVVLFLAWRLKHRDSDAMWLWWISIAGDFWFGVTWLLNQASKLNPVKRVPDLSLLRRRFDDGGLPGI
DVFINTVDPVDEPMLYTMNSILSILATDYPADRHAAYLSDDGASLAHYEGLIETARFAALWVPFCRKHRVEPRAPES
YFAAKAAPYAGPALPEEFFGDRRLVRREYEEFKARLDALFTDIPQRSEASVGNANTKGAKATLMADGTPWPGTWTEP
AENHKKGQHAGIVKVMLSHPGEEPQLGMPASSGHPLDFSAVDVRLPILVYIAREKRPGYDHQKKAGAMNAQLRVSAL
LSNAPFIFNFDGDHYINNSQAFRAALCFMLDCRHGDDTAFVQFPQRFDDVDPTDRYCNHNRVFFDATLLGLNGVQGP
SYVGTGCMFRRVALYGADPPRWRPEDDDAKALGCPGRYGNSMPFINTIPAAASQERSIASPAAASLDETAAMAEVEE
VMTCAYEDGTEWGDGVGWVYDIATEDVVTGFRLHRKGWRSMYCAMEPDAFRGTAPINLTERLYQILRWSGGSLEMFF
SRNCPLLAGCRLRPMQRVAYANMTAYPVSALFMVVYDLLPVIWLSHHGEFHIQKPFSTYVAYLVAVIAMIEVIGLVE
IKWAGLTLLDWWRNEQFYMIGATGVYLAAVLHIVLKRLLGLKGVRFKLTAKQLAGGARERFAELYDVHWSPLLAPTV
VVMAVNVTAIGAAAGKAVVGGWTPAQVAGASAGLVFNVWVLVLLYPFALGIMGRWSKRPCALFALLVAACAAVAAGF
VAVHAVLAAGSAAPSWLGWSRGATAILPSSWRLKRGF
>LOC_Os07g36680.1
(SEQ ID NO: 110)
MSMAGDVWFGFSWVLNQLPKLSPIKRFPDLAALADRHSDELPGVDVFVTTVDPVDEPILYTVNTILSILAADYPVDS
SRRKSLAKAISEKAANEVEVASASPQMAAHFGYRRESQMGRESVVYIGGTQETGGRPPEKLESILGCYFFSFFLTDI
YGSHVCHVRQNHYLNSEGLDLLRFSKMEEVLYPVLQLRETLWEDDMGHRGERTGGIRGGRGVGQAASTRR
>LOC_Os07g36690.1
(SEQ ID NO: 111)
MAATAASTMSAAAAVTRRINAALRVDATSGDVAAGADGQNGRRSPVAKRVNDGGGGKDDVWVAVDEKDVCGARGGDG
AARPPLFRTYKVKGSILHPYRFLILLRLIAIVAFFAWRVRHKNRDGVWLWTMSMVGDVWFGFSWVLNQLPKLSPIKR
VPDLAALADRHSGDLPGVDVFVTTVDPVDEPILYTVNTILSILAADYPVDRYACYLSDDGGTLVHYEAMVEVAKFAE
LWVPFCRKHCVEPRSPENYFAMKTQAYKGGVPGELMSDHRRVRREYEEFKVRIDSLSSTIRQRSDVYNAKHAGENAT
WMADGTHWPGTWFEPADNHQRGKHAGIVQVLLNHPSCKPRLGLAASAENPVDFSGVDVRLPMLVYISREKRPGYNHQ
KKAGAMNVMLRVSALLSNAPFVINFDGDHYVNNSQAFRAPMCFMLDGRGRGGENTAFVQFPQRFDDVDPTDRYANHN
RVFFDGTMLSLNGLQGPSYLGTGTMFRRVALYGVEPPRWGAAASQIKAMDIANKFGSSTSFVGTMLDGANQERSITP
LAVLDESVAGDLAALTACAYEDGTSWGRDVGWVYNIATEDVVTGFRMHRQGWRSVYASVEPAAFRGTAPINLTERLY
QILRWSGGSLEMFFSHSNALLAGRRLHPLQRVAYLNMSTYPIVTVFIFFYNLFPVMWLISEQYYIQRPFGEYLLYLV
AVIAMIHVIGMFEVKWAGITLLDWCRNEQFYMIGSTGVYPTAVLYMALKLVTGKGIYFRLTSKQTTASSGDKFADLY
TVRWVPLLIPTIVIIVVNVAAVGVAVGKAAAWGPLTEPGWLAVLGMVFNVWILVLLYPFALGVMGQWGKRPAVLFVA
MAMAVAAVAAMYVAFGAPYQAELSGGAASLGKAAASLTGPSG
>LOC_Os07g36700.1
(SEQ ID NO: 112)
MSAAAAVTSWTNGCWSPAATRVNDGGKDDVWVAVDEADVSGARGSDGGGRPPLFQTYKVKGSILHPYRFLILARLIA
IVAFFAWRIRHKNRDGAWLWTMSMVGDVWFGFSWVLNQLPKQSPIKRVPDIAALADRHSGDLPGVDVFVTTVDPVDE
PILYTVNTILSILAADYPVDRYACYLSDDGGTLVHYEAMVEVAKFAELWVPFCRKHCVEPRSPENYFAMKTQAYKGG
VPGELMSDHRRVRREYEEFKVRIDSLSSTIRQRSDVYNAKHAGENATWMADGTHWPGTWFEPADNHQRGKHAGIVQV
LLNHPSCKPRLGLAASAENPVDFSGVDVRLPMLVYISREKRPGYNHQKKAGAMNVMLRVSALLSNAPFVINFDGDHY
VNNSQAFRAPMCFMLDGRGRGGENTAFVQFPQRFDDVDPTDRYANHNRVFFDGTMLSLNGLQGPSYLGTGTMFRRVA
LYGVEPPRWGAAASQIKAMDIANKFGSSTSFVGTMLDGANQERSITPLAVLDESVAGDLAALTACAYEDGTSWGRDV
GWVYNIATEDVVTGFRMHRQGWRSVYASVEPAAFRGTAPINLTERLYQILRWSGGSLEMFFSHSNALLAGRRLHPLQ
RVAYLNMSTYPIVTVFIFFYNLFPVMWLISEQYYIQRPFGEYLLYLVAVIAMIHVIGMFEVKWAGITLLDWCRNEQF
YMIGSTGVYPTAVLYMALKLVTGKGIYFRLTSKQTAASSGDKFADLYTVRWVPLLIPTIVIMVVNVAAVGVAVGKAA
AWGPLTEPGWLAVLGMVFNVWILVLLYPFALGVMGQWGKRPAVLFVAMAMAVAAVAAMYVAFGAPYQAELSGVAASL
GKVAAASLTGPSG
>LOC_Os07g36740.1
(SEQ ID NO: 113)
MSAAAVTRRINAGGLRVEVTNGNGAAGVYVAAAAAPCSPAAKRVNDGGGKDDVWVAVDEADVSGPSGGDGVRPTLFR
TYKVKGSILHPYRFLILVRLIAIVAFFAWRVRHKNRDGAWLWTMSMAGDVWFGFSWALNQLPKLNPIKRVADLAALA
DRQQHGTSGGGELPGVDVFVTTVDPVDEPILYTVNSILSILAADYPVDRYACYLSDDGGTLVHYEAMVEVAKFAELW
VPFCRKHCVEPRAPESYFAMKTQAYRGGVAGELMSDRRRVRREYEEFKVRIDSLFSTIRKRSDAYNRAKDGKDDGEN
ATWMADGTHWPGTWFEPAENHRKGQHAGIVQVLLNHPTSKPRFGVAASVDNPLDFSGVDVRLPMLVYISREKRPGYN
HQKKAGAMNALLRVSALLSNAPFIINFDCDHYVNNSQAFRAPMCFMLDRRGGGDDVAFVQFPQRFDDVDPTDRYANH
NRVFFDGTTLSLNGLQGPSYLGTGTMFRRAALYGLEPPRWGAAGSQIKAMDNANKFGASSTLVSSMLDGANQERSIT
PPVAIDGSVARDLAAVTACGYDLGTSWGRDAGWVYDIATEDVATGFRMHQQGWRSVYTSMEPAAFRGTAPINLTERL
YQILRWSGGSLEMFFSHSNALLAGRRLHPLQRIAYLNMSTYPIVTVFIFFYNLFPVMWLISEQYYIQQPFGEYLLYL
VAIIAMIHVIGMFEVKWSGITVLDWCRNEQFYMIGSTGVYPTAVLYMALKLFTGKGIHFRLTSKQTTASSGDKFADL
YTVRWVPLLIPTIVVLAVNVGAVGVAVGKAAAWGLLTEQGRFAVLGMVFNVWILALLYPFALGIMGQRGKRPAVLFV
ATVMAVAAVAIMYAAFGAPYQAGLSGVAASLGKAASLTGPSG
>LOC_Os07g36750.1
(SEQ ID NO: 114)
MASPASVAGGGEDSNGCSSLIDPLLVSRTSSIGGAERKAAGGGGGGAKGKHWAAADKGERRAAKECGGEDGRRPLLF
RSYRVKGSLLHPYRALIFARLIAVLLFFGWRIRHNNSDIMWFWTMSVAGDVWFGFSWLLNQLPKFNPVKTIPDLTAL
RQYCDLADGSYRLPGIDVFVTTADPIDEPVLYTMNCVLSILAADYPVDRSACYLSDDSGALILYEALVETAKFATLW
VPFCRKHCIEPRSPESYFELEAPSYTGSAPEEFKNDSRIVHLEYDEFKVRLEALPETIRKRSDVYNSMKTDQGAPNA
TWMANGTQWPGTWIEPIENHRKGHHAGIVKVVLDHPIRGHNLSLKDSTGNNLNFNATDVRIPMLVYVSRGKNPNYDH
NKKAGALNAQLRASALLSNAQFIINFDCDHYINNSQAFRAAICFMLDQREGDNTAFVQFPQRFDNVDPKDRYGNHNR
VFFDGTMLALNGLQGPSYLGTGCMFRRLALYGIDPPHWRQDNITPEASKFGNSILLLESVLEALNQDRFATPSPVND
IFVNELEMVVSASFDKETDWGKGVGYIYDIATEDIVTGFRIHGQGWRSMYCTMEHDAFCGTAPINLTERLHQIVRWS
GGSLEMFFSHNNPLIGGRRLQPLQRVSYLNMTIYPVTSLFILLYAISPVMWLIPDEVYIQRPFTRYVVYLLVIILMI
HMIGWLEIKWAGITWLDYWRNEQFFMIGSTSAYPTAVLHMVVNLLTKKGIHFRVTSKQTTADTNDKFADLYEMRWVP
MLIPTMVVLVANIGAIGVAIGKTAVYMGVWTIAQKRHAAMGLLFNMWVMFLLYPFALAIMGRWAKRSIILVVLLPII
FVIVALVYVATHILLANIIPF
>LOC_Os10g20260.1
(SEQ ID NO: 115)
MPPSAGLATESLPAATCPAKKDAYAAAASPESETKLAAGDERAPLVRTTRISTTTIKLYRLTIFVRIAIFVLFFKWR
ITYAARAISSTDAGGIGMSKAATFWTASIAGELWFAFMWVLDQLPKTMPVRRAVDVTALNDDTLLPAMDVFVTTADP
DKEPPLATANTVLSILAAGYPAGKVTCYVSDDAGAEVTRGAVVEAARFAALWVPFCRKHGVEPRNPEAYFNGGEGGG
GGGKARVVARGSYKGRAWPELVRDRRRVRREYEEMRLRIDALQAADARRRRCGAADDHAGVVQVLIDSAGSAPQLGV
ADGSKLIDLASVDVRLPALVYVCREKRRGRAHHRKAGAMNALLRASAVLSNAPFILNLDCDHYVNNSQALRAGICFM
IERRGGGAEDAGDVAFVQFPQRFDGVDPGDRYANHNRVFFDCTELGLDGLQGPIYVGTGCLFRRVALYGVDPPRWRS
PGGGVAADPAKFGESAPFLASVRAEQSHSRDDGDAIAEASALVSCAYEDGTAWGRDVGWVYGTVTEDVATGFCMHRR
GWRSAYYAAAPDAFRGTAPINLADRLHQVLRWAAGSLEIFFSRNNALLAGGRRRLHPLQRAAYLNTTVYPFTSLFLM
AYCLFPAIPLIAGGGGWNAAPTPTYVAFLAALMVTLAAVAVLETRWSGIALGEWWRNEQFWMVSATSAYLAAVAQVA
LKVATGKEISFKLTSKHLASSATPVAGKDRQYAELYAVRWTALMAPTAAALAVNVASMAAAGGGGRWWWWDAPSAAA
AAAAALPVAFNVWVVVHLYPFALGLMGRRSKAVRPILFLFAVVAYLAVRFLCLLLQFHTA
>LOC_Os10g42750.1
(SEQ ID NO: 116)
MASKGILKNGGKPPTAPSSAAPTVVFGRRTDSGRFISYSRDDLDSEISSVDFQDYHVHIPMTPDNQPMDPAAGDEQQ
YVSSSLFTGGFNSVTRAHVMEKQASSARATVSACMVQGCGSKIMRNGRGADILPCECDFKICVDCFTDAVKGGGGVC
PGCKEPYKHAEWEEVVSASNHDAINRALSLPHGHGHGPKMERRLSLVKQNGGAPGEFDHNRWLFETKGTYGYGNAIW
PEDDGVAGHPKELMSKPWRPLTRKLRIQAAVISPYRLLVLIRLVALGLFLMWRIKHQNEDAIWLWGMSIVCELWFAL
SWVLDQLPKLCPINRATDLSVLKDKFETPTPSNPTGKSDLPGIDIFVSTADPEKEPVLVTANTILSILAADYPVDKL
ACYVSDDGGALLTFEAMAEAASFANLWVPFCRKHEIEPRNPDSYFNLKRDPFKNKVKGDFVKDRRRVKREYDEFKVR
VNGLPDAIRRRSDAYHAREEIQAMNLQREKMKAGGDEQQLEPIKIPKATWMADGTHWPGTWLQASPEHARGDHAGII
QVMLKPPSPSPSSSGGDMEKRVDLSGVDTRLPMLVYVSREKRPGYDHNKKAGAMNALVRASAIMSNGPFILNLDCDH
YVYNSKAFREGMCFMMDRGGDRLCYVQFPQRFEGIDPSDRYANHNTVFFDVNMRALDGLQGPVYVGTGCLFRRIALY
GFDPPRSKDHTTPWSCCLPRRRRTRSQPQPQEEEEETMALRMDMDGAMNMASFPKKFGNSSFLIDSIPVAEFQGRPL
ADHPSVKNGRPPGALTIPRETLDASIVAEAISVVSCWYEEKTEWGTRVGWIYGSVTEDVVTGYRMHNRGWKSVYCVT
HRDAFRGTAPINLTDRLHQVLRWATGSVEIFFSRNNALFASSKMKVLQRIAYLNVGIYPFTSVFLIVYCFLPALSLF
SGQFIVQTLNVTFLTYLLIITITLCLLAMLEIKWSGIALEEWWRNEQFWLIGGTSAHLAAVLQGLLKVIAGIEISFT
LTSKQLGDDVDDEFAELYAVKWTSLMIPPLTIIMINLVAIAVGFSRTIYSTIPQWSKLLGGVFFSFWVLAHLYPFAK
GLMGRRGRTPTIVYVWSGLVAITISLLWIAIKPPSAQANSQLGGSFSFP
>LOC_Os12g29300.1
(SEQ ID NO: 117)
MDVFVTTADPDGIAALDDDALLPAMDVFVTTADPDKEPPLATANTVLSIYPRRGLPRRQVVQVLIDSAGSVPQLGVA
DGSKLIDVASVDVCLPALVYVCREKRRGHAHHRKAGAMNAPFILDLDCDHYVNNSQALRAGICFMIERGGGGAAEDA
VAVAFVQFPQRVDGVDPSDRYANHNRVFFDCTELGLDGLQGPIYVGTGCLFRRVALYSVDLPRWRPRRSLGCRLLGE
DERLWSRLKQMVI
>LOC_Os03g07350.1
(SEQ ID NO: 118)
MEGQWGRWRLAAAAAASSSGDQIAAAWAVVRARAVAPVLQFAVWACMAMSVMLVLEVAYMSLVSLVAVKLLRRVPER
RYKWEPITTGSGGVGGGDGEDEEAATGGREAAAFPMVLVQIPMYNEKEVYKLSIGAACALTWPPDRIIIQVLDDSTD
PAIKDLVELECKDWARKEINIKYEIRDNRKGYKAGALKKGMEHIYTQQCDFVAIFDADFQPESDFLLKTIPFLVHNP
KIGLVQTRWEFVNYDVCLMTRIQKMSLDYHFKVEQESGSSMHSFFGFNGTAGVWRVSAINEAGGWKDRTTVEDMDLA
VRASLKGWQFLYVGDIRVKSELPSTFKAYRHQQHRWTCGAANLFRKMATEIAKNKGVSVWKKLHLLYSFFFVRRVVA
PILTFLFYCVVIPLSVMVPEVSIPVWGMVYIPTAITIMNAIRNPGSIHLMPFWILFENVMAMHRMRAALTGLLETMN
VNQWVVTEKVGDHVKDKLEVPLLEPLKPTDCVERIYIPELMVAFYLLVCASYDLVLGAKHYYLYIYLQAFAFIALGF
GFAGTSTPCS
>LOC_Os03g26044.1
(SEQ ID NO: 119)
MEAGEAAGAVLFLLAAAVSLLAAVSTGALDFTYLVTVVGEGSSTSPGSGGGAWWREAWVGARSRAVAPALQVGVWAC
MVMSVMLVVEATYNSAVSVAARLVGWRPERWFKWEPLGGGAGAGDEEKGEAAAAAYPMVMVQIPMYNELEVYKLSIG
AVCGLKWPKERLIIQVLDDSTDAFIKNLVELECEDWASKGLNIKYATRSGRKGFKAGALKKGMEWDYAKQCEYVAIF
DADFQPEPDFLLRTVPFLMHNQNVALVQARWVFVNDRVSLLTRIQKTFLDYHFKAEQEAGSATFAFFSFNGTAGVWR
TEAINDAGGWKDRTTVEDMDLAVRATLKGWKFIYLGDLRVKSELPSTYKAYCRQQFRWSCGGANLFRKMIWDVLVAK
KVSSLKKIYILYSFFLVRRVVAPAVAFILYNVIIPVSVMIPELFLPIWGVAYIPTALLIVTAIRNPENLHTVPLWIL
FESVMSMHRLRAAVAGLLQLQEFNQWIVTKKVGNNAFDENNETPLLQKSRKRLINRVNLPEIGLSVFLIFCASYNLV
FHGKNSFYINLYLQGLAFFLLGLNCVGTLPDHCCF
>LOC_Os03g56060.1
(SEQ ID NO: 120)
MVLVQIPMCNEKEVYQQSIAAVCNLDWPRSNFLVQVLDDSDDPTTQTLIREEVLKWQQNGARIVYRHRVLRDGYKAG
NLKSAMSCSYVKDYEFVAIFDADFQPNPDFLKRTVPHFKDNDELGLVQARWSFVNKDENLLTRLQNINLCFHFEVEQ
QVNGIFLNFFGFNGTAGVWRIKALDDSGGWMERTTVEDMDIAVRAHLRGWKFIFLNDVECQCELPESYEAYRKQQHR
WHSGPMQLFRLCLPDIIKCKIVFWKKANLIFLFFLLRKLILPFYSFTLFCIILPMTMFVPEAELPDWVVCYIPALMS
LLNILPSPKSFPFIIPYLLFENTMSVTKFNAMISGLFQLGNAYEWVVTKKSGRSSEGDLISLAPKELKHQKTESAPN
LDAIAKEQSAPRKDVKKKHNRIYKKELALSLLLLTAAARSLLSKQGIHFYFLLFQGISFLLVGLDLIGEQIE
>LOC_Os03g60700.2
(SEQ ID NO: 121)
MAAAGWPLSSSVADLLPASLSLTLLLASLVHPLPPSAPFLLRLLALLIPSPRPSRAQVVVVVLAAAAFFFEHIRKIG
CTHSLERTEVSAAFFEDPNSLNKVRCPSIYDPAEKYISLIIPAYNEEHRLPEALTETLNYLKQRSAVEKSFTYEVLI
VDDGSTDHTSKVAFEFVRKHKIDNVRVLLLGRNHGKGEAVRKGMLHSRGELLLMLDADGATKVTDLEKLEAQVCHKL
NQNMFYKVLLCIL
>LOC_Os03g60939.2
(SEQ ID NO: 122)
MADDAGGGRREYSIIVPTYNERLNVALIVYLIFKHLPDVNFEIIVVDDGSPDGTQDIVKQLQQIYGENRVLLRARPR
KLGLGTAYLHGLKHASGDFVVIMDADLSHHPKYLPSFIRKQKETGADVVTGTRYVQNGGVHGWNLMRKLTSRGANVL
AQTLLQPGASDLTGSFRCYINGMS
>LOC_Os06g12460.1
(SEQ ID NO: 123)
MAMAGADGPTAGAAAAVRWRGGESLLLLLLRWPSSAELVAAWGAARASAVAPALAAASAACLALSAMLLADAVLMAA
ACFARRRPDRRYRATPLGAGAGADDDDDDEEAGRVAYPMVLVQIPMYNEREVYKLSIGAACGLSWPSDRLIVQVLDD
STDPTVKTWYDRLRKTLVQQAHPAQADMDVHQSTKRKNKELMTRVPILECDSNHGLASIISSYLIAVGLVELECKSW
GNKGKNVKYEVRNTRKGYKAGALKEGLLRDYVQQCNYVAIFDADFQPEPDFLLRTIPYLVRNPQIGLVQAHWEFVNT
SECLMTRIQKMTLHYHFKVEQEGGSSTFAFFGFNGTAGVWRISALEEAGGWKDRTTVEDMDLAVRAGLKGWKFVYLA
DVKVKSELPSNLKTYRHQQHRWTCGAANLFRKVGAEILFTKEVPFWWKFYLLYSFFFVRKVVAHVVPFMLYCVVIPF
SVLIPEVTVPVWGVVYVPTTITLLHAIRNTSSIHFIPFWILFENVMSFHRTKAMFIGLLELGGVNEWVVTEKLGNGS
NTKPASQILERPPCRFWDRWTMSEILFSIFLFFCATYNLAYGGDYYFVYIYLQAIAFLVVGIGFCGTISSNS
>LOC_Os07g03260.1
(SEQ ID NO: 124)
MAPWSGFWAASRPALAAAAAGGTPVVVKMDNPNWSISEIDADGGEFLAGGRRRGRGKNAKQITWVLLLKAHRAAGCL
AWLASAAVALGAAARRRVAAGRTDDADAETPAPRSRLYAFIRASLLLSVFLLAVELAAHANGRGRVLAASVDSFHSS
WVRFRAAYVAPPLQLLADACVVLFLVQSADRLVQCLGCLYIHLNRIKPKPISSPAAAAAALPDLEDPDAGDYYPMVL
VQIPMCNEKEVYQQSIAAVCNLDWPRSNILVQVLDDSDDPITQSLIKEEVEKWRQNGARIVYRHRVLREGYKAGNLK
SAMSCSYVKDYEYVAIFDADFQPYPDFLKRTVPHFKDNEELGLVQARWSFVNKDENLLTRLQNINLCFHFEVEQQVN
GIFINFFGFNGTAGVWRIKALEDSGGWMERTTVEDMDIAVRAHLNGWKFVFLNDVECQCELPESYEAYRKQQHRWHS
GPMQLFRLCLPDIIRCKIAFWKKANLIFLFFLLRKLILPFYSFTLFCIILPMTMFIPEAELPDWVVCYIPALMSFLN
ILPAPKSFPFIIPYLLFENTMSVTKFNAMISGLFQLGSAYEWVVTKKSGRSSEGDLIALAPKELKQQKILDLTAIKE
QSMLKQSSPRNEAKKKYNRIYKKELALSLLLLTAAARSLLSKQGIHFYFLMFQGLSFLLVGLDLIGEDVK
>LOC_Os07g43710.1
(SEQ ID NO: 125)
MVEAGEIGGAAVFALAAAAALSAASSLGAVDFRRPLAAVGGGGAFEWDGVVPWLIGVLGGGDEAAAGGVSVGVAAWY
EVWVRVRGGVIAPTLQVAVWVCMVMSVMLVVEATFNSAVSLGVKAIGWRPEWRFKWEPLAGADEEKGRGEYPMVMVQ
IPMYNELEVYKLSIGAACELKWPKDKLIVQVLDDSTDPFIKNLVELECESWASKGVNIKYVTRSSRKGFKAGALKKG
MECDYTKQCEYIAIFDADFQPEPNFLLRTVPFLMHNPNVALVQARWAFVNDTTSLLTRVQKMFFDYHFKVEQEAGSA
TFAFFSFNGTAGVWRTTAINEAGGWKDRTTVEDMDLAVRASLNGWKFIYVGDIRVKSELPSTYGAYCRQQFRWACGG
ANLFRKIAMDVLVAKDISLLKKFYMLYSFFLVRRVVAPMVACVLYNIIVPLSVMIPELFIPIWGVAYIPMALLIITT
IRNPRNLHIMPFWILFESVMTVLRMRAALTGLMELSGFNKWTVTKKIGSSVEDTQVPLLPKTRKRLRDRINLPEIGF
SVFLIFCASYNLIFHGKTSYYFNLYLQGLAFLLLGFNFTGNFACCQ
>LOC_Os08g33740.1
(SEQ ID NO: 126)
MSSSGGGGVAEEVARLWGELPVRVVWAAVAAQWAAAAAAARAAVVVPAVRALVAVSLAMTVMILAEKLFVAAVCLAV
RAFRLRPDRRYKWLPIGAAAAAASSEDDEESGLVAAAAAFPMVLVQIPMFNEREVYKLSIGAACSLDWPSDRVVIQV
LDDSTDLVVKVFIVIYFTDISSRIIRSTSSLVIKDLVEKECQKWQGKGVNIKYEVRGNRKGYKAGALKEGLKHDYVK
ECEYIAMFDADFQPESDFLLRTVPFLVHNSEIALVQTRWKFVNANECLLTRFQEMSLDYHFKYEQEAGSSVYSFFGF
NGTAGVWRIAAIDDAGGWKDRTTVEDMDLAVRATLQGWKFVYVGDVKVKSELPSTFKAYRFQQHRWSCGPANLFKKM
MVEILENKKVSFWNKIHLWYDFFFVGKIAAHTVTFIYYCFVIPVSVWLPEIEIPLWGVVYVPTVITLCKAVGTPSSF
HLVILWVLFENVMSLHRIKAAVTGILEAGRVNEWVVTEKLGDANKTKPDTNGSDAVKVIDVELTTPLIPKLKKRRTR
FWDKYHYSEIFVGICIILSGFYDVLYAKKGYYIFLFIQGLAFLIVGFDYIGVCPP
>LOC_Os09g26770.1
(SEQ ID NO: 127)
MASLRAATGLPFSPRPACCRPPSSPGSRRGFVFPPRFAPGVFLFFPLDSAGGGGVARRRAYPRIEATARHGARKENP
KVRNRRLQKKFNGTATKPRLSVFCSNRQLYAMLVDDHNKKILFYGSTLQKAICGDPPCGAVEAAGRIGEELIRACKE
LDITEISSYDRNGFARGEKMMAFEVPDLVELECIDWARKEINIKYEIRDNRKGYKAGALKKGMEHIYTQQCDFVAIF
DADFQPESDFLLKIIPFLVHNPKIGLVQTRWEFVNYDVCLMTRIQKMSLDYHFKVEQESGSSMHSFFGFNGTAAVWR
VSATINEAGGWKDHTTVEDMDLAVRLLRVNSQVPSKPTDIGSIDGLVGVSVWKKLHLLYSFFFVRRVVAPILTFLFY
RVVIPLSVMVPEISIPVWGMILFENVMAMHRMRAALTGLLETMNVNQWVVTEKVGDHVKDKLEVPLLEPLKPTDCVE
RIYIPELVVAFYLLEGFSGRNATGVNRSKDV
>LOC_Os09g26770.2
(SEQ ID NO: 128)
MASLRAATGLPFSPRPACCRPPSSPGSRRGFVFPPRFAPGVFLFFPLDSAGGGGVARRRAYPRIEATARHGARKENP
KVRNRRLQKKFNGTATKPRLSVFCSNRQLYAMLVDDHNKKILFYGSTLQKAICGDPPCGAVEAAGRIGEELIRACKE
LDITEISSYDRNGFARGEKMMAFEVPDLVELECIDWARKEINIKYEIRDNRKGYKAGALKKGMEHIYTQQCDFVAIF
DADFQPESDFLLKIIPFLVHNPKIGLVQTRWEFVNYDVCLMTRIQKMSLDYHFKVEQESGSSMHSFFGFNGTAAVWR
VSATINEAGGWKDHTTVEDMDLAVRLLRVNSQVPSKPTDIGSIDGLVGVSVWKKLHLLYSFFFVRRVVAPILTFLFY
RVVIPLSVMVPEISIPVWGMILFENVMAMHRMRAALTGLLETMNVNQWVVTEKVGDHVKDKLEVPLLEPLKPTDCVE
RIYIPELVVAFYLLEGFSGRNATGVNRSKDV
>LOC_Os09g39920.1
(SEQ ID NO: 129)
MMSGGLAWAWRAVRCGVVLPTLQLAVYVCVAMSIMLFLERLYMALVVAALWLIRRRRRRSNRREQDDDGAENDQLLQ
DPEAANSPMVLVQIPMFNEKQVYRLSIGAACGMTWPSDKLVIQVLDDSTDPAIREMVEGECGRWAGKGVSIRYENRR
NRSGYKAGAMREGLRKAYARECELVAIFDADFQPDADFLLRTVPVLVADPGVALVQARWRFVNADECLLTRIQEMSL
DYHFRVEQEVGSACHGFFGFNGTAGVWRVRALEEAGGWKERTTVEDMDLAVRASLRGWRFVYVGHVGVRNELPSTLR
AYRYQQHRWSCGPANLFRKIFLEAPPPACPPGRSSTSSTISSSSASSSPTSSPSPSTASSSPPASSPAPTTSASPST
SPSTSPPPSPSSTPPAPRAPAISSSSGSSSRTSCPCTGPRPRSSACSRPPAPTSGSSPTSEATPTPSTSSQLIPPPG
LGGRPPPAPAAQASSIMTSMSPRSSWGPACSTAPSTTSPTAATASTSTCSSSRPPPSSSASATSGPSSYYYSYSTCI
HV
>LOC_Os10g26630.1
(SEQ ID NO: 130)
MASSSSSSLPAAWAAAVRAWAVAPALRAAVWACLAMSAMLVAEAAWMGLASLAAAAARRLRGYGYRWEPMAAPPDVE
APAPAPAEFPMVLVQIPMYNEKEVYKLSIGAACALTWPPDRIIIQVLDDSTDPFVKFSLVQELVELECKEWASKKIN
IKYEVRNNRKGYKAGALRKGMEHTYAQLCDFVAIFDADFEPESDFLLKTMPYLLHNPKIALVQTRWEFVNYNVCLMT
RIQKMSLDYHFKVEQESGSFMHAFFGFNGTAGVWRVSAINQSGGWKDRTTVEDMDLAVRASLKGWEFLYVGDIRVKS
ELPSTFQAYRHQQHRWTCGAANLFRKMAWEIITNKEVSMWKKYHLLYSFFFVRRAIAPILTFLFYCIVIPLSAMVPE
VTIPVWGLVYIPTAITIMNAIRNPGSVHLMPFWILFENVMAMHRMRAALSGLLETARANDWVVTEKVGDQVKDELDV
PLLEPLKPTECAERIYIPELLLALYLLICASYDFVLGNHKYYIYIYLQAVAFTVMGFGFVGTRTPCS
>LOC_Os01g04920.2
(SEQ ID NO: 131)
MEYPPQFPTPQLHTPISSSSSSSSSPRLYTRRVELLLLLFLAPPQHRRLEAHANAGSEEKDCFFFFFCVCAVFLGFL
AMVIGAEIKDEMEEAPPLLLDEAARPRRVALFVEPSPFAYISGYKNRFQNFIKHLREMGDEVIVVTNHEGVPQEFHG
AKVIGSWSFPCPMYGKVPLSLALSPRIISEVAKFKPDIIHASSPGIMVFGALAIAKLLGVPLVMSYHTHVPVYIPRY
TFSWLVEPMWQVIRFLHRAADLTLVPSVAISKDFETAHVISANRIRLWNKGVDSASFHPKFRSHEMRVRLRTLWA
>LOC_Os01g04920.3
(SEQ ID NO: 132)
MEYPPQFPTPQLHTPISSSSSSSSSPRLYTRRVELLLLLFLAPPQHRRLEAHANAGSEEKDCFFFFFCVCAVFLGFL
AMVIGAEIKDEMEEAPPLLLDEAARPRRVALFVEPSPFAYISGYKNRFQNFIKHLREMGDEVIVVTNHEGVPQEFHG
AKVIGSWSFPCPMYGKVPLSLALSPRIISEVAKFKPDIIHASSPGIMVFGALAIAKLLGVPLVMSYHTHVPV
>LOC_Os02g09170.1
(SEQ ID NO: 133)
MLRHFSALAPSPLLFLLFLPFPWLRLHSSAHSSPPPRSRRDLHGGGGGMAGNDNWINSYLDAILDAGKAAIGGDRPS
LLLRERGHFSPARYFVEEVITGYDETDLYKTWLRANAMRSPQERNTRLENMTWRIWNLARKKKEFEKEEACRLLKRQ
PEAEKLRTDTNADMSEDLFEGEKGEDAGDPSVAYGDSTTGSSPKTSSIDKLYIVLISLHGLVRGENMELGRDSDTGG
QVKYVVELAKALSSSPGVYRVDLLTRQILAPNFDRSYGEPTEMLVSTSFKNSKQEKGENSGAYIIRIPFGPKDKYLA
KEHLWPFIQEFVDGALGHIVRMSKTIGEEIGCGHPVWPAVIHGHYASAGIAAALLSGSLNIPMAFTGHFLGKDKLEG
LLKQGRHSREQINMTYKIMCRIEAEELSLDASEIVIASTRQEIEEQWNLYDGFEVILARKLRARVKRGANCYGRYMP
RMVIIPPGVEFGHIIHDFEMDGEEENPCPASEDPPIWSQIMRFFTNPRKPMILAVARPYPEKNITSLVKAFGECRPL
RELANLTLIMGNREAISKMNNMSAAVLTSVLTLIDEYDLYGQVAYPKHHKHSEVPDIYRLAARTKGAFVNVAYFEQF
GVTLIEAAMNGLPIIATKNGAPVEINQVLNNGLLVDPHDQNAIADALYKLLSDKQLWSRCRENGLKNIHQFSWPEHC
KNYLSRILTLGPRSPAIGGKQEQKAPISGRKHIIVISVDSVNKEDLVRIIRNTIEVTRTEKMSGSTGFVLSTSLTIS
EIRSLLVSAGMLPTVFDAFICNSGSNIYYPLYSGDTPSSSQVTPAIDQNHQAHIEYRWGGEGLRKYLVKWATSVVER
KGRIERQIIFEDPEHSSTYCLAFRVVNPNHLPPLKELRKLMRIQSLRCNALYNHSATRLSVVPIHASRSQALRYLCI
RWGIELPNVAVLVGESGDSDYEELLGGLHRTVILKGEFNIPANRIHTVRRYPLQDVVALDSSNIIGIEGYSTDDMKS
ALQQIGVLTQ
>LOC_Os02g09170.2
(SEQ ID NO: 134)
MLRHFSALAPSPLLFLLFLPFPWLRLHSSAHSSPPPRSRRDLHGGGGGMAGNDNWINSYLDAILDAGKAAIGGDRPS
LLLRERGHFSPARYFVEEVITGYDETDLYKTWLRANAMRSPQERNTRLENMTWRIWNLARKKKEFEKEEACRLLKRQ
PEAEKLRTDTNADMSEDLFEGEKGEDAGDPSVAYGDSTTGSSPKTSSIDKLYIVLISLHGLVRGENMELGRDSDTGG
QVKYVVELAKALSSSPGVYRVDLLTRQILAPNFDRSYGEPTEMLVSTSFKNSKQEKGENSGAYIIRIPFGPKDKYLA
KEHLWPFIQEFVDGALGHIVRMSKTIGEEIGCGHPVWPAVIHGHYASAGIAAALLSGSLNIPMAFTGHFLGKDKLEG
LLKQGRHSREQINMTYKIMCRIEAEELSLDASEIVIASTRQEIEEQWNLYDGFEVILARKLRARVKRGANCYGRYMP
RMVIIPPGVEFGHIIHDFEMDGEEENPCPASEDPPIWSQIMRFFTNPRKPMILAVARPYPEKNITSLVKAFGECRPL
RELANLTLIMGNREAISKMNNMSAAVLTSVLTLIDEYDLYGQVAYPKHHKHSEVPDIYRLAARTKGAFVNVAYFEQF
GVTLIEAAMNGLPIIATKNGAPVEINQVLNNGLLVDPHDQNAIADALYKLLSDKQLWSRCRENGLKNIHQFSWPEHC
KNYLSRILTLGPRSPAIGGKQEQKAPISGRKHIIVISVDSVNKEDLVRIIRNTIEVTRTEKMSGSTGFVLSTSLTIS
EIRSLLVSAGMLPTVFDAFICNSGSNIYYPLYSGDTPSSSQVTPAIDQNHQAHIEYRWGGEGLRKYLVKWATSVVER
KGRIERQIIFEDPEHSSTYCLAFRVVNPNHLPPLKELRKLMRIQSLRCNALYNHSATRLSVVPIHASRSQALRYLCI
RWGIELPNVAVLVGESGDSDYEELLGGLHRTVILKGEFNIPANRIHTVRRYPLQDVVALDSSNIIGIEGYSTDDMKS
ALQQIGVLTQ
>LOC_Os02g09170.3
(SEQ ID NO: 135)
MAPRERDAEPAGEEHAAGEHDVEDLEPREEEEGDMSEDLFEGEKGEDAGDPSVAYGDSTTGSSPKTSSIDKLYIVLI
SLHGLVRGENMELGRDSDTGGQVKYVVELAKALSSSPGVYRVDLLTRQILAPNFDRSYGEPTEMLVSTSFKNSKQEK
GENSGAYIIRIPFGPKDKYLAKEHLWPFIQEFVDGALGHIVRMSKTIGEEIGCGHPVWPAVIHGHYASAGIAAALLS
GSLNIPMAFTGHFLGKDKLEGLLKQGRHSREQINMTYKIMCRIEAEELSLDASEIVIASTRQEIEEQWNLYDGFEVI
LARKLRARVKRGANCYGRYMPRMVIIPPGVEFGHIIHDFEMDGEEENPCPASEDPPIWSQIMRFFTNPRKPMILAVA
RPYPEKNITSLVKAFGECRPLRELANLTLIMGNREAISKMNNMSAAVLTSVLTLIDEYDLYGQVAYPKHHKHSEVPD
IYRLAARTKGAFVNVAYFEQFGVTLIEAAMNGLPIIATKNGAPVEINQVLNNGLLVDPHDQNAIADALYKLLSDKQL
WSRCRENGLKNIHQFSWPEHCKNYLSRILTLGPRSPAIGGKQEQKAPISGRKHIIVISVDSVNKEDLVRIIRNTIEV
TRTEKMSGSTGFVLSTSLTISEIRSLLVSAGMLPTVFDAFICNSGSNIYYPLYSGDTPSSSQVTPAIDQNHQAHIEY
RWGGEGLRKYLVKWATSVVERKGRIERQIIFEDPEHSSTYCLAFRVVNPNHLPPLKELRKLMRIQSLRCNALYNHSA
TRLSVVPIHASRSQALRYLCIRWGIELPNVAVLVGESGDSDYEELLGGLHRTVILKGEFNIPANRIHTVRRYPLQDV
VALDSSNIIGIEGYSTDDMKSALQQIGVLTQ
>LOC_Os06g43630.1
(SEQ ID NO: 136)
MYGNDNWINSYLDAILDAGKGAAASASASAVGGGGGAGDRPSLLLRERGHFSPARYFVEEVITGYDETDLYKTWLRA
NAMRSPQEKNTRLENMTWRIWNLARKKKELEKEEANRLLKRRLETERPRVETTSDMSEDLFEGEKGEDAGDPSVAYG
DSTTGNTPRISSVDKLYIVLISLHGLVRGENMELGRDSDTGGQVKYVVELAKALSSCPGVYRVDLFTRQILAPNFDR
SYGEPVEPLASTSFKNFKQERGENSGAYIIRIPFGPKDKYLAKEHLWPFIQEFVDGALSHIVKMSRAIGEEISCGHP
AWPAVIHGHYASAGVAAALLSGALNVPMVFTGHFLGKDKLEELLKQGRQTREQINMTYKIMCRIEAEELALDASEIV
IASTRQEIEEQWNLYDGFEVILARKLRARVKRGANCYGRYMPRMVIIPPGVEFGHMIHDFDMDGEEDGPSPASEDPS
IWSEIMRFFTNPRKPMILAVARPYPEKNITTLVKAFGECRPLRELANLTLIMGNREAISKMHNMSAAVLTSVLTLID
EYDLYGQVAYPKRHKHSEVPDIYRLAVRTKGAFVNVPYFEQFGVTLIEAAMHGLPVIATKNGAPVEIHQVLDNGLLV
DPHDQHAIADALYKLLSEKQLWSKCRENGLKNIHQFSWPEHCKNYLSRISTLGPRHPAFASNEDRIKAPIKGRKHVT
VIAVDSVSKEDLIRIVRNSIEAARKENLSGSTGFVLSTSLTIGEIHSLLMSAGMLPTDFDAFICNSGSDLYYPSCTG
DTPSNSRVTFALDRSYQSHIEYHWGGEGLRKYLVKWASSVVERRGRIEKQVIFEDPEHSSTYCLAFKVVNPNHLPPL
KELQKLMRIQSLRCHALYNHGATRLSVIPIHASRSKALRYLSVRWGIELQNVVVLVGETGDSDYEELFGGLHKTVIL
KGEFNTSANRIHSVRRYPLQDVVALDSPNIIGIEGYGTDDMRSALKQLDIRAQ
>LOC_Os08g34000.1
(SEQ ID NO: 137)
MGPTCQSLFLSFSVHLLPPAPPGCGAATRRGSCTEAEAENDPFDVIHSESVAMFHCWARDVPNLVVSWHGISLEALH
SRIYQDLTRGEDERMSPASNHSLAQSVYRVLSEVHFFRSYVHHVAISDTTGEMLRDVYQIPNRRVHVILNGVDEAQF
EPDAALGRAFREDLRLPKGANLVLGVSGRLVKGADLVLVAVGQISLSLP
>LOC_Os06g04200.1
(SEQ ID NO: 138)
MSALTTSQLATSATGFGIADRSAPSSLLRHGFQGLKPRSPAGGDATSLSVTTSARATPKQQRSVQRGSRRFPSVVVY
ATGAGMNVVFVGAEMAPWSKTGGLGDVLGGLPPAMAANGHRVMVISPRYDQYKDAWDTSVVAEIKVADRYERVRFFH
CYKRGVDRVFIDHPSFLEKVWGKTGEKIYGPDTGVDYKDNQMRFSLLCQAALEAPRILNLNNNPYFKGTYGEDVVFV
CNDWHTGPLASYLKNNYQPNGIYRNAKVAFCIHNISYQGRFAFEDYPELNLSERFRSSFDFIDGYDTPVEGRKINWM
KAGILEADRVLTVSPYYAEELISGIARGCELDNIMRLTGITGIVNGMDVSEWDPSKDKYITAKYDATTAIEAKALNK
EALQAEAGLPVDRKIPLIAFIGRLEEQKGPDVMAAAIPELMQEDVQIVLLGTGKKKFEKLLKSMEEKYPGKVRAVVK
FNAPLAHLIMAGADVLAVPSRFEPCGLIQLQGMRYGTPCACASTGGLVDTVIEGKTGFHMGRLSVDCKVVEPSDVKK
VAATLKRAIKVVGTPAYEEMVRNCMNQDLSWKGPAKNWENVLLGLGVAGSAPGIEGDEIAPLAKENVAAP
>LOC_Os06g04200.2
(SEQ ID NO: 139)
MSALTTSQLATSATGFGIADRSAPSSLLRHGFQGLKPRSPAGGDATSLSVTTSARATPKQQRSVQRGSRRFPSVVVY
ATGAGMNVVFVGAEMAPWSKTGGLGDVLGGLPPAMAANGHRVMVISPRYDQYKDAWDTSVVAEIKVADRYERVRFFH
CYKRGVDRVFIDHPSFLEKVWGKTGEKIYGPDTGVDYKDNQMRFSLLCQAALEAPRILNLNNNPYFKGTYGEDVVFV
CNDWHTGPLASYLKNNYQPNGIYRNAKVAFCIHNISYQGRFAFEDYPELNLSERFRSSFDFIDGYDTPVEGRKINWM
KAGILEADRVLTVSPYYAEELISGIARGCELDNIMRLTGITGIVNGMDVSEWDPSKDKYITAKYDATTAIEAKALNK
EALQAEAGLPVDRKIPLIAFIGRLEEQKGPDVMAAAIPELMQEDVQIVLLGTGKKKFEKLLKSMEEKYPGKVRAVVK
FNAPLAHLIMAGADVLAVPSRFEPCGLIQLQGMRYGTPCACASTGGLVDTVIEGKTGFHMGRLSVDCKVVEPSDVKK
VAATLKRAIKVVGTPAYEEMVRNCMNQDLSWKGPAKNWENVLLGLGVAGSAPGIEGDEIAPLAKENVAAP
>LOC_Os06g04200.3
(SEQ ID NO: 140)
MSALTTSQLATSATGFGIADRSAPSSLLRHGFQGLKPRSPAGGDATSLSVTTSARATPKQQRSVQRGSRRFPSVVVY
ATGAGMNVVFVGAEMAPWSKTGGLGDVLGGLPPAMAANGHRVMVISPRYDQYKDAWDTSVVAEIKVADRYERVRFFH
CYKRGVDRVFIDHPSFLEKVWGKTGEKIYGPDTGVDYKDNQMRFSLLCQAALEAPRILNLNNNPYFKGTYGEDVVFV
CNDWHTGPLASYLKNNYQPNGIYRNAKVAFCIHNISYQGRFAFEDYPELNLSERFRSSFDFIDGYDTPVEGRKINWM
KAGILEADRVLTVSPYYAEELISGIARGCELDNIMRLTGITGIVNGMDVSEWDPSKDKYITAKYDATTAIEAKALNK
EALQAEAGLPVDRKIPLIAFIGRLEEQKGPDVMAAAIPELMQEDVQIVLLGTGKKKFEKLLKSMEEKYPGKVRAVVK
FNAPLAHLIMAGADVLAVPSRFEPCGLIQLQGMRYGTPCACASTGGLVDTVIEGKTGFHMGRLSVDCKVVEPSDVKK
VAATLKRAIKVVGTPAYEEMVRNCMNQDLSWKGPAKNWENVLLGLGVAGSAPGIEGDEIAPLAKENVAAP
>LOC_Os06g04200.4
(SEQ ID NO: 141)
MSALTTSQLATSATGFGIADRSAPSSLLRHGFQGLKPRSPAGGDATSLSVTTSARATPKQQRSVQRGSRRFPSVVVY
ATGAGMNVVFVGAEMAPWSKTGGLGDVLGGLPPAMAANGHRVMVISPRYDQYKDAWDTSVVAEIKVADRYERVRFFH
CYKRGVDRVFIDHPSFLEKVWGKTGEKIYGPDTGVDYKDNQMRFSLLCQAALEAPRILNLNNNPYFKGTYGEDVVFV
CNDWHTGPLASYLKNNYQPNGIYRNAKVAFCIHNISYQGRFAFEDYPELNLSERFRSSFDFIDGYDTPVEGRKINWM
KAGILEADRVLTVSPYYAEELISGIARGCELDNIMRLTGITGIVNGMDVSEWDPSKDKYITAKYDATTAIEAKALNK
EALQAEAGLPVDRKIPLIAFIGRLEEQKGPDVMAAAIPELMQEDVQIVLLGTGKKKFEKLLKSMEEKYPGKVRAVVK
FNAPLAHLIMAGADVLAVPSRFEPCGLIQLQGMRYGTPCACASTGGLVDTVIEGKTGFHMGRLSVDCKVVEPSDVKK
VAATLKRAIKVVGTPAYEEMVRNCMNQDLSWKGPAKNWENVLLGLGVAGSAPGIEGDEIAPLAKENVAAP
>LOC_Os01g52710.1
(SEQ ID NO: 142)
MKVYITSAAPLAGEATKAMASPPSPPPHQHQQAATRRGCRSAVVTGLLAGVLLFRAALLTIEAGASLCPSTTGCLDW
RAGLGDWLYGGSGDAMEEFMKEWRRGRREASLLDPVVVEAAPDSLDGLMAEMDTMLASYDRLDMEAVVLKIMAMLLK
MDRKVKSSRIRALFNRHLASLGIPKSMHCLTLRLAEEFAVNSAARSPVPLPEHAPRLADASYLHVTIVTDNVLAAAV
AVASAVRSSAEPARLVFHVVTDKKSYVPMHSWFALHPVSPAVVEVKGLHQFDWRDGGAIASVMRTIEEVQRSSMEYH
QCDASVVREYRRLEASKPSTFSLLNYLKIHLPEFFPELGRVILLDDDVVVRKDLTGLWEQHLGENIIGAVGGHNPGE
DGVVCIEKTLGDHLNFTDPEVSNVLESARCAWSWGVNVVNLDAWRRTNVTDTYQLWLEKNRESGFRLWKMGSLPPAL
IAFDGRVQAVEPRWHLRGLGWHTPDGEQLQRSAVLHFSGPRKPWLEVAFPELRELWLGHLNRSDSFLQGCGVVE
>LOC_Os02g35020.1
(SEQ ID NO: 143)
MVKTNRFINSLSKRGYIGSYHYEKDAKYRPFSALLPEGSNPKMLYVKLVLIILMCGSFVSLLNSPSIHHNDDHHTES
SAGVPRVSYEPDDTRYVSDVTVDWPKISKAMQLVAGAEHGGGARVALLNFDDGEVQQWRTALPQTAAAVARLERAGS
NVTWEHLYPEWIDEEELYHAPTCPDLPEPAVDADGDGEEVAVFDVVAVKLPCRRGGGWSKDVARLHLQLAAARLAAT
RGRGGAAAHVLVVSASRCFPIPNLFRCRDEVAPRDGDVWLYRPDADALRRDLALPVGSCRLAMPFSALAAPHVAAAS
APPPRREAYATILHSEELYACGALVAAQSIRMASASGAPSEPERDMVALVDETISARHRGALEAAGWKVRAIRRVRN
PRAAADAYNEWNYSKFWLWSLTEYDRVVFLDADLLVQRPMSPLFAMPEVSATANHGTLFNSGVMVVEPCGCTLRLLM
DHIADIDSYNGGDQGYLNEVFSWWHRLPSHANFMKHFWEGDSGERLAAARRAVLAAEPAVALAVHFVGMKPWFCFRD
YDCNWNSPQLRQFASDEAHARWWRAHDAMPAALQGFCLLDERQKALLRWDAAEARAANFSDGHWRVPIADPRRNICA
TAAGDGEAAAACVEREIENRRVEGNRVTTSYAKLIDNF
>LOC_Os02g51130.1
(SEQ ID NO: 144)
MAGGGGGGRASAQRRAALAALITLLLLASLAFLLSATGTASAPNSAPFRLAAIRRHAEDHAAVLAAYAAQARKLSAA
SASQTESFLSISGHLSSLSSRISLSTVALLEKETRGQIKRARSLAGAAKEAFDTQSKIQKLSDTVFAVDQQLLRARR
AGLLNSRIAAGSTPKSLHCLVMRLLEARLANASAIPDDPPVPPPQFTDPALYHYAIFSDNVLAVSVVVASAARAAAE
PARHVFHVVTAPMYLPAFRVWFARRPPPLGTHVQLLAVSDFPFLNASASPVIRQIEDGNRDVPLLDYLRFYLPEMFP
ALRRVVLLEDDVVVQRDLAGLWRVDLGGKVNAALETCFGGFRRYGKHINFSDPAVQERFNPRACAWSYGLNVFDLQA
WRRDQCTQRFHQLMEMNENGTLWDPASVLPAGLMTFYGNTRPLDKSWHVMGLGYNPHIRPEDIKGAAVIHFNGNMKP
WLDVAFNQYKHLWTKYVDTEMEFLTLCNFGL
>LOC_Os06g49810.1
(SEQ ID NO: 145)
MAGARAMAFVALCALAAFPVAVTGAQVDPLYSSKQVLDWSSQANIKLQNFSLTEEDGLQLLVRPEEVTHRKLRERTR
IKKKIEPVQQDDEALVKLENAGIERSKAVDSAVLGKYSIWRRENENEKADSKVRLMRDQMIMARIYSVLAKSRDKLD
LHQDLLSRLKESQRSLGEATADAELPKSASERVKVMGQLLAKARDQLYDCKAITQRLRAMLQSADEQVRSLKKQSTF
LSQLAAKTIPNGIHCLSMRLTIDYYLLSPEKRKFPKSENLENPDLYHYALFSDNVLAASVVVNSTIMNAKEPEKHVF
HLVTDKLNFGAMNMWFLLNPPGDATIHVENVDDFKWLNSSYCPVLKQLESVAMKEYYFKADRPKTLSAGSSNLKYRN
PKYLSMLNHLRFYLPQVYPKLNKILFLDDDIVVQKDLTGLWEVDLNGNVNGAVETCGESFHRFDKYLNFSNPNIAQN
FDPNACGWAYGMNMFDLEEWKKKDITGIYHKWQNMNENRLLWKLGTLPPGLLTFYKLTHPLDKSWHVLGLGYNPSIE
RSEIDNAAVIHYNGNMKPWLEIAMSKYRPYWTKYINYEHTYVRGCKISQ
>LOC_Os08g38740.1
(SEQ ID NO: 146)
MATMASAAAASASARRWRWRWKWRTRDAVLALLIASVLAPPLLLYGGAPIAPFSGPILMGSAASGLDLSNLIARKEV
RERLNALKQDAFAAVKEPIQTVASDAAALKAGLIQHIVDQSSGIDRGTKDNGMVASVNKKGGVEFTKENGLIDDGKL
RENKVRAMRNSSGLNITLNKVKGSYAVSTEEYAFHQTIPPLTDLMFGTFPPALLDHTADRPPEKTTDTTSEDSDIRA
ISNNTSHSTASPDSTIRVLRDQLKRARTYIGFLSSRGNHGFIKDLRRRMRDIQQALSGATNDKQLPKKYYLSHRYTK
FFTVGISDDDLCLVSGVHGRIREMELTLTKIKQVHENCAAIISKLQATLHSTEEQMQAHKQEANYVTQIAAKALPKR
LNCLAMRLTNEYYSSSSSNKHFPYEEKLEDPKLQHYALFSDNVLGAAVVVNSTIIHAKTPENHVFHIVTDKLNYAAM
RMWFLENSQGKAAIEVQNIEDFTWLNSSYSPVLKQLESQFMINYYFKTQQDKRDNNPKFQNPKYLSILNHLRFYLPE
IFPKLNKVLFLDDDIVVQQDLSALWSIDLKGKVNGAIQTCGETFHRFDRYLNFSNPLIAKNFERRACGWAYGMNMFD
LSEWRKRNITDVYHYWQEQNEHRLLWKLGTLPAGLVTFWNQTFPLDHKWHLLGLGYKPNVNQKDIEGAAVIHYNGNR
KPWLEIAMAKYRKYWSKYVNFDNVFIRQCNIHP
>LOC_Os09g30280.1
(SEQ ID NO: 147)
MVAVARGRRCRGVVLLLLLSSVLAPLVLYGGSPVSVSTLPDSTVASGVLDRDGEYNLVVAASDVSLTKDLTIERLGE
HKNRVLSATEDWQVVEAASKNPAFEKSDASVSRKDPGSGDANVVITEGNGAAQSGRDGVIWEVVSRDRGSDGFTQPW
EINGGEERDGERVDRVKLGVSVEEQNDGTGETGVNNIAGTHTSGNLNSSLEKERSTGRLSEQVTKAIEKESYTPTTN
SNSALPTSVSAGHSTTSPDATIRTIKDQLTRATTYLSLVASRGNHGFARELRARMRDIQRVLGDATSGGQLPQNVLS
KIRAMEQTLGKGKRILDSCSGALNRLRATLHSTEERLQSHKKETNYLAQVAAKSLPKGLHCLPLRLTNEYYYTNSNN
KKFPHIEKLEDPKLYHYALFSDNVLAAAVVVNSTIIHAKKPADHVFHIVTDRLNYAAMKMWFLANPLGEAAIQVQNI
EEFTWLNSTYSPVMKQLESQSMIDYYFKSGQARRDENPKFRNPKYLSMLNHLRFYLPEIFPKLSKVLFLDDDTVVQQ
DLSAIWSIDLKGKVNGAVETCGETFHRFDKYLNFSNPLIASNFDPRACGWAYGMNVFDLSEWRRQKITDVYHNWQRL
NENRILWKLGTLPAGLVTFWNRTFPLHHSWHQLGLGYNPNINEKDIRRASVIHYNGNLKPWLEIGLSRYRKYWSKYV
DFDQVFLRDCNINP
>LOC_Os04g35270.1
(SEQ ID NO: 148)
MSSPPSSGSERSLASLVSAAAHSVKLNRAYLLAPAVAAGLLAAVLLSSLLDFSAFSASPRPAFPPPTAGAPANASAL
SAPPRAPVRTALDTLGTRPREPFTALRDAYARWDAAVGCAAFAEKHRSRSSPPPGPAALQDPEAAPCGSLRLPHVAL
AVRGVTWVPDILDGVYQCRCGLTCLWSRNEEALADTPDVVLYEIWPPPDTRKQGEPLRAFMDIEPTRKRSGHEDIFI
GYHADDDVQVTYAGKFFRITHNYHVATHKRDDVLVYWSSSRCFEHRNKIARELFRHLPAHSFGRCENNVGGGDKALE
LYPDCARDGHGAAEWWDHLHCAMSHYKFVLAIENTIADSYSTEKLYYALEAGSVPIYFGAPNARDLAPPGSYIDGAA
FASAEELAAYVREVAGDPAAYAEFHAWRRCGVLGGYGRNRLVSLDTLPCRLCERASRMGGRHAPAPNATVS
>LOC_Os01g56570.1
(SEQ ID NO: 149)
MHLSGARLRIPTWCTMPHGSWLLQTCSPSAALASLAVVTTSLLIIGYASSSFFLGAPAYEYDDVVEAAAAVPRRGPG
YPPVLAYYISGGHGDSVRMTRLLKAVYHPRNRYLLHLDAGAGAYERARLAGYARSERAFLEYGNVHVVGKGDPVDGR
GPSAVAAVLRGAAVLLRVGAEWDWLVTLGASDYPLVTPDDLLYAFSSVRRGLSFIDHRMDSGGAEAVVVDQNLLQST
NAEISFSSGQRAKPDAFELFRGSPRPILSRDFVEYCVVAPDNLPRTLLLYFSNSLSPMEFYFQTVMANSAQFRNSTV
NHNLRHTVAQDGGAPTSQGADGQQASRYDAMVGSGAAFAGAFGDDDDALLQRIDEEVLRRPLDGVTPGEWCVADGEE
GTDNECSVGGDIDVVRHGAKGRKLATLVVDLVGA
>LOC_Os03g05180.1
(SEQ ID NO: 150)
MLMYYTNMPLPHRKYFQTVLCNSPEFNRTVVNHDLHYSKWDSSSKKEPLLLTLDDVENMTQSGVAFGTRFSMDDPVL
NHIDEEILHRQPEEPAPGGWCIGVGDASPCSVSVDLQACLINSRAASTSAQTLTPRRLRPTLPEKTLKHSSSDVVPA
TRRSWSSIPSSTNSATYRLSDRIMATASSMVYRRIRGTTMDGRLYSLRTCTIVFASAASVTLAAARLARSSSGSMNR
SICAARPRKMLSTLPFSAMIVLSTLVAPAATPLSGSRHSSPA
>LOC_Os03g48560.1
(SEQ ID NO: 151)
MDTHAVPRAAATVDLRWLLSVAAGAVFALLLLLAASPPFPLRPASLFTTTSPRRALPPLFVESSSTLSAPPPTPPPS
PPRFAYLISGSAGDAPMMRRCLLALYHPRNSYTLHLDAEAPDDDRAGLAAFVAAHPALSAAANVRVIRKANLVTYRG
PTMVTTTLHAAAAFLWGRGGGRGADWDWFINLSASDYPLVTQDDLMHVFSKLPRDLNFIDHTSDIGWKAFARAMPMI
VDPALYMKTKGELFWIPERRSLPTAFKLFTGSAWMVLSRPFVEYLIWGWDNLPRTVLMYYANFISSPEGYFHTVACN
AGEFRNTTVNSDLHFISWDNPPMQHPHYLADADWGPMLASGAPFARKFRRDDSVLDRIDADLLSRRPGMVAPGAWCG
AAAAADGDSNSTTTGGAVDPCGVAGGGGEAVRPGPGAERLQRLVASLLSEENFRPRQCKVVEAN
>LOC_Os04g23580.1
(SEQ ID NO: 152)
MRPPARSPPRLAAAAAALATSAALLLICGTWPASASGFGAYTASSSARRASSTGGADAPPPSFAYLISGTGGEAARV
VRLLRAVYHPRNRYLLHLDAAAGAEERAELAAAVRGVRAWRERANVDVVGEGYAVDRAGPSALAAALHGAAVLLRVA
ADWDWFVTLSSSDYPLVTQDDLLYAFSSVPRDLNFIDHTSDLGWKEHERFEKLIVDPSLYMDRNSEILPATEPRQMP
DAFKIFTVNYKFLLRTQSVLKHERRTNNDDGSPWVILSRNFTEHCVHGWDNLPRKLLMYFANTAYSMESYFQTVICN
SSKFRNTTVNGDLRYFVWDDPPGLEPLVLDESHFDDMVNSSAAFARRFVDDSPVLKKIDKEILNRSSAVCASFSRRR
GMDVDSCSKWGDVNVLQPARAGEQLRRFISEISQTRGCS
>LOC_Os06g40060.2
(SEQ ID NO: 153)
MMLTHQFIEYCIWGWDNLPRTVLMYYANFLSSPEGYFHTVICNVPEFRNTTVNHDLHFISWDNPPKQHPHYLTLNDF
DGMVNSNAPFARKFGREDPVLDKIDQELLGRQPDGFVAGGWMDLLNTTTVKGSFTVERVQDLRPGPGADRLKKLVTG
LLTQEGFDDKHCL
>LOC_Os09g25890.1
(SEQ ID NO: 154)
MPHHRHLTPSPSHEEHETPNPSLTPPPMQLAALASDEPPPPPPEQSPRRIVVAHRLPLNATPDPGSPFGFAFSLSAD
AHALQLSHGLGLAHVVFVGTLPAEAARALRRSDELDRHLLGCFSCLPVFLPPRAHDEFYAGFCKHYLWPRLHYLLPH
APAANGYLHFDAGLYRSYASANRSFAARVVEVLSPDDGDLVFVHDYHLWLLPSFLRRGCPRCRVGFFLHSPFPSAEV
FRSIPVREDLLRALLNADLVGFHTYDYARHFLSACSRLLGLAYTSRHGRVGINYHGRTVLIKFLSVGVDMGLLRTAM
ASPEAAAKFREITEVEYKGRVLMVGVDDVDIFKGVRLKLLAMESLLETYPALRGRVVLVQIHNPTRCGGRDVERVRG
ETAKIQARINARFGGPGYQPVVVVDRAVPMAEKVAYYAAAECCVVSAVRDGLNRIPYFYTVCREEGPVDAKGAAGGQ
PRHSAIVLSEFVGCSPSLSGAIRVNPWNIEAMAEAMHGALTMNVAEKQARHVKHYTYLKLHDVIVWARSFAADLQLA
CKDRSTMRTIGMGIGPSYRVVAVDAAFKKLPPELVNLSYRAAAAAAAGGGGGRLILLDYDGTLEPTGAFDNAPSDAV
IVILDELCSDPNNVVFIVSGRSKDDLERWLAPCANLGIAAEHGYFIRWSRDAPWETMASKQLAAAMEWKAAAKNVMR
HYAEATDGSYIEAKETGMVWRYEDADPRLAPLQAKELLDHLATVLASEPVAVRSGYKIVEVIPQGVSKGVAAECIVS
AMAARRGGALGFVLCVGDDRSDEDMFGALASLCGGGKNGGASSSTTTTTALLAAAQVFACTVGNKPSMASYYLNDKE
EVVDMLHGLAFSSPSSRLRAAAAPRRPADFDIKSLLRCE
>LOC_Os09g25890.2
(SEQ ID NO: 155)
MPHHRHLTPSPSHEEHETPNPSLTPPPMQLAALASDEPPPPPPEQSPRRIVVAHRLPLNATPDPGSPFGFAFSLSAD
AHALQLSHGLGLAHVVFVGTLPAEAARALRRSDELDRHLLGCFSCLPVFLPPRAHDEFYAGFCKHYLWPRLHYLLPH
APAANGYLHFDAGLYRSYASANRSFAARVVEVLSPDDGDLVFVHDYHLWLLPSFLRRGCPRCRVGFFLHSPFPSAEV
FRSIPVREDLLRALLNADLVGFHTYDYARHFLSACSRLLGLAYTSRHGRVGINYHGRTVLIKFLSVGVDMGLLRTAM
ASPEAAAKFREITEVEYKGRVLMVGVDDVDIFKGVRLKLLAMESLLETYPALRGRVVLVQIHNPTRCGGRDVERVRG
ETAKIQARINARFGGPGYQPVVVVDRAVPMAEKVAYYAAAECCVVSAVRDGLNRIPYFYTVCREEGPVDAKGAAGGQ
PRHSAIVLSEFVGCSPSLSGAIRVNPWNIEAMAEAMHGALTMNVAEKQARHVKHYTYLKLHDVIVWARSFAADLQLA
CKDRSTMRTIGMGIGPSYRVVAVDAAFKKLPPELVNLSYRAAAAAAAGGGGGRLILLDYDGTLEPTGAFDNAPSDAV
IVILDELCSDPNNVVFIVSGRSKDDLERWLAPCANLGIAAEHGYFIRWSRDAPWETMASKQLAAAMEWKAAAKNVMR
HYAEATDGSYIEAKETGMVWRYEDADPRLAPLQAKELLDHLATVLASEPVAVRSGYKIVEGVSKGVAAECIVSAMAA
RRGGALGFVLCVGDDRSDEDMFGALASLCGGGKNGGASSSTTTTTALLAAAQVFACTVGNKPSMASYYLNDKEEVVD
MLHGLAFSSPSSRLRAAAAPRRPADFDIKSLLRCE
>LOC_Os02g44510.2
(SEQ ID NO: 156)
MILSVLKQTQRPVKFWFIKNYLSPQFKDVIPHMAQEYGFEYELVTYKWPTWLHKQKEKQRIIWAYKILFLDVIFPLS
LRKVIFVDADQIVRADMGELYDMNLKGRPLAYTPFCDNNKEMDGYRFWKQGFWKDHLRGRPYHISALYVVDLAKFRQ
TASGDTLRVFYETLSKDPNSLSNLDQDLPNYAQHTVPIFSLPQEWLWCESWCGNATKARAKTIDLCNNPMTKEPKLQ
GAKRIVPEWVDLDSEARQFTARILGDNPESPGTTSPPSDTPKSDDKGAKHDEL
>LOC_Os02g44510.3
(SEQ ID NO: 157)
MILSVLKQTQRPVKFWFIKNYLSPQFKDVIPHMAQEYGFEYELVTYKWPTWLHKQKEKQRIIWAYKILFLDVIFPLS
LRKVIFVDADQIVRADMGELYDMNLKGRPLAYTPFCDNNKEMDGYRFWKQGFWKDHLRGRPYHISALYVVDLAKFRQ
TASGDTLRVFYETLSKDPNSLSNLDQDLPNYAQHTVPIFSLPQEWLWCESWCGNATKARAKTIDLCNNPMTKEPKLQ
GAKRIVPEWVDLDSEARQFTARILGDNPESPGTTSPPSDTPKSDDKGAKHDEL
>LOC_Os07g23740.1
(SEQ ID NO: 158)
MRGASGGGEGFVGASSVSNNISLPNEGTSPRGTDNAECSETSSDRSNSESIKPEECAMPSSIFDKKISIKKKLRLLS
RMAILKDDGTVEVDIPTNAEAASLDLSSNDYCNEAFSGEPLASSDFQHRPPMQIVMLIVGTRGDVQPFIAIGKRLQI
YGHRVRLATHANFKDFVVTAGLEFYPLGGDPKLLAGYMVKNKGFLPATPSEIPIQRKEIKEIIFSLLPACKDPDTDT
GAPFNVNAIIANPAAYGHVHVAEALKVPIHIIFTMPWTPTCEFPHPFSRVKQPAGYRLSYQIVDSFVWLGIRDIIND
LRKRKLKLRPVTYLSSAHAYSNDIPHAYIWSPYLVPKPKDWGPKIDVVGFCFLDLASNYKPPEPLLKWLESGEKPIY
IGFGSLPIPEPDKLTRIIVEALEITGQRGIINKGWGGLGNLEEPKEFVYVIDNIPHDWLFLQCKAVVHHGGAGTTAA
SLKAACPTTIVPFFGDQFFWGNMVHARGLGAPPVPVEQLQLHLLVDAIKFMMDPKVKERAVELAKAIESEDGVDGAV
KAFLKHLPQPRSLEKPQPAPPSSTFMQPFLLPVKRCFGIAT
>LOC_Os08g20420.1
(SEQ ID NO: 159)
MSDTGGGHRASAEALRDAFRLEFGDAYQVFVRDLGKEYGGWPLNDMERSYKFMIRHVRLWKVAFHGTSPRWVHGMYL
AALAYFYANEVVAGIMRYNPDIIISVHPLMQHIPLWVLKWQSLHPKVPFVTVITDLNTCHPTWFHHGVTRCYCPSAE
VAKRALLRGLEPSQIRVYGLPIRPSFCRAVLDKDELRKELDMDPDLPAVLLMGGGEGMGPVEETARALSDELYDRRR
RRPVGQIVVICGRNQVLRSTLQSSRWNVPVKIRGFEKQMEKWMGACDCIITKAGPGTIAEALIRGLPIILNDFIPGQ
EVGNVPYVVDNGAGVFSKDPREAARQVARWFTTHTNELRRYSLNALKLAQPEAVFDIVKDIHKLQQQPATVTRIPYS
LTSSFSYSI
>LOC_Os08g20420.2
(SEQ ID NO: 160)
MSDTGGGHRASAEALRDAFRLEFGDAYQVFVRDLGKEYGGWPLNDMERSYKFMIRHVRLWKVAFHGTSPRWVHGMYL
AALAYFYANEVVAGIMRYNPDIIISVHPLMQHIPLWVLKWQSLHPKVPFVTVITDLNTCHPTWFHHGVTRCYCPSAE
VAKRALLRGLEPSQIRVYGLPIRPSFCRAVLDKDELRKELDMDPDLPAVLLMGGGEGMGPVEETARALSDELYDRRR
RRPVGQIVVICGRNQVLRSTLQSSRWNVPVKIRGFEKQMEKWMGACDCIITKAGPGTIAEALIRGLPIILNDFIPGQ
VCADATILNSLE
>LOC_Os04g42760.1
(SEQ ID NO: 161)
MKRRHWSHPSCGLLLLVAVFCLLLVFRCSQLRHSGDGAAAAAPDGGAGRNDGDDVDERLVELAAVDPAAMAVLQAAK
RLLEGNLARAPERHRDVALRGLREWVGKQERFDPGVMSELVELIKRPIDRYNGDGGGGGEGEGRRYASCAVVGNSGI
LLAAEHGELIDGHELVVRLNNAPAGDGRYARHVGARTGLAFLNSNVLSQCAVPRRGACFCRAYGEGVPILTYMCNAA
HFVEHAVCNNASSSSSGAADATAAAPVIVTDPRLDALCARIVKYYSLRRFARETGRPAEEWARRHEEGMFHYSSGMQ
AVVAAAGVCDRVSVFGFGKDASARHHYHTLQRRELDLHDYEAEYEFYRDLESRPEAIPFLRQRNSGFRLPPVSFYR
>LOC_Os02g06840.1
(SEQ ID NO: 162)
MSWRKGGGGDGGVSRRWAVLLCLGSFCLGLLFTNRMWTLPEANEIARPNGNGDEGNTLVAAECGPKKVQHPDYKDIL
RVQDTHHGVQTLDKTIASLETELSAARSLQESLLNGSPVAEEFKLSESIGRRKYLMVIGINTAFSSRKRRDSIRYTW
MPQGEKRKKLEEEKGIIIRFVIGHSAISGGIVDRAIEAEDRKHGDFMRIDHVEGYLALSGKTKTYFATAVSLWDADF
YVKVDDDVHVNIATLGQILSNHALKPRVYIGCMKSGPVLTEKGVRYYEPEHWKFGEPGNKYFRHATGQLYAISKDLA
TYISINRHVLHKYINEDVSLGSWFIGLDVEHIDDRRLCCGTPPDCEWKAQAGNTCAASFDWRCSGICNSEGRIWEVH
NKCAEGEKALWNATF
>LOC_Os02g06840.2
(SEQ ID NO: 163)
MSWRKGGGGDGGVSRRWAVLLCLGSFCLGLLFTNRMWTLPEANEIARPNGNGDEGNTLVAAECGPKKVQHPDYKDIL
RVQDTHHGVQTLDKTIASLETELSAARSLQESLLNGSPVAEEFKLSESIGRRKYLMVIGINTAFSSRKRRDSIRYTW
MPQGEKRKKLEEEKGIIIRFVIGHSAISGGIVDRAIEAEDRKHGDFMRIDHVEGYLALSGKTKTYFATAVSLWDADF
YVKVDDDVHVNIATLGQILSNHALKPRVYIGCMKSGPVLTEKGVRYYEPEHWKFGEPGNKYFRHATGQLYAISKDLA
TYISINRHVLHKYINEDVSLGSWFIGLDVEHIDDRRLCCGTPPDCEWKAQAGNTCAASFDWRCSGICNSEGRIWEVH
NKCAEGEKALWNATF
>LOC_Os02g36770.1
(SEQ ID NO: 164)
MAHAADTAIMLVFVFRLLAFTLTILLSPLMWVTKRLGITVLIVLFPLLIVHHLIVNSPVSGPSRYQVIHSNLLGWLS
DSLGNSVAQNPDNTPVEVIPADASASNSSDSGNSSLEGFQWLNTWNHMKQLTNISDGLPHANEAIDNARTAWENLTI
SVHNSTSKQIKKERQCPYSIHRMNASKPDTGDFTIDIPCGLIVGSSVTIIGTPGSLSGNFRIDLVGTELPGGSGKPI
VLHYDVRLTSDELTGGPVIVQNAFTASNGWGYEDRCPCSNCNNATQVDDLERCNSMVGREEKRAINSKQHLNAKKDE
HPSTYFPFKQGHLAISTLRIGLEGIHMTVDGKHVTSFPYKAGLEAWFVTEVGVSGDFKLVSAIASGLPTSEDLENSF
DLAMLKSSPIPEGKDVDLLIGIFSTANNFKRRMAIRRTWMQYDAVREGAVVVRFFVGLHTNLIVNKELWNEARTYGD
IQVLPFVDYYSLITWKTLAICIYGTGAVSAKYLMKTDDDAFVRVDEIHSSVKQLNVSHGLLYGRINSDSGPHRNPES
KWYISPEEWPEEKYPPWAHGPGYVVSQDIAKEINSWYETSHLKMFKLEDVAMGIWIAEMKKGGLPVQYKTDERINSD
GCNDGCIVAHYQEPRHMLCMWEKLLRTNQATCCN
>LOC_Os02g54390.1
(SEQ ID NO: 165)
MAMKRLSFSLFLLPFLLLAFVYSLFFPGYFSILPSLAARCSNSVAATPANATGPAVDLRVLLGVVTRAEMYERRALL
RLAYALQPAPARAVVDVRFFVCSLAREEDAVLVSLEIIAHGDVVVLNCTENMDDGKTHSYFSSLPALFADAPYDYVG
KIDDDSYYRLASLADTLRDKPRRDLYHGFPAPCHADPRSQFMSGMGYIVSWDVAAWVAATEALRGDVKGPEDEVFGR
WLRRGGKGSNRYGEETRMYDYLDGGMREGVNCFRHALVADTVVVHKLKDRLKWARTLKFFNATQGLKPSKLYHVDL
>LOC_Os02g54420.1
(SEQ ID NO: 166)
MAMKKSFSLLFFLPFLLLAIIYFVIFPNEFRLQSSLAACGDSAPATAADAVAKAAPDIRVLLGVLTRADKYERRALV
RLAYALQPAPARAVVHVRFVVCNLTAEEDAALVGLEIAAYGDIIVLDCTENMDNGKTYTYFSAVPRLFAGEPYDYVG
KTDDDTYYRLGALADALRDKPRRDAYYGFLTPCHADPRTQYMSGMGYVVSWDVAAWVAATPELQNDLKGPEDKLFGR
WLRWGGRGRNVFGAEPRMYDYLDGGMRHGPTCFRHLLQADTVAVHKLKDNLKWARTLNFFNATEGHKASPLFHVDH
>LOC_Os02g54450.1
(SEQ ID NO: 167)
MAANFSACLVPVAVLALFYLVIFPNDLSQLKSALAPCDAASKSVAAAAAADDDVDFRMFFGILTRPDFYERRALLRM
AYALQPPPRRAAIDVRFVMCSLDKEEDAVLVAMEIITHGDILVLNCTENMNDGKTYDYFSALPRLFPAGAEPRYDFA
GKIDDDTYYRLGALADTLRRKPRRDMYHGFLNPCHIDPAWQYMSGMGYIVSWDVAEWIAASPELRGREIGYEDDVFG
RWLRGAGKGKNRFGEEPRMYDYLDREMYGADVNCFRHELIADTVAVHKLKDRLKWARTLRFFNATDGLKPSKMYHVD
LTPRI
>LOC_Os03g48610.1
(SEQ ID NO: 168)
MRRPRRAAAGCGCGRRLRPLLMLLPFAALLSVATFSLHSPVGLVVPAAVTVATSTDTDTDTASSHHHHHGLVGDAVS
GIDIRALNATPPLHAAAVRAFRSGGRLLREAFLPGAAPPPAVGGGPDPSPPRCPPFVALSGAELRGAGDALALPCGL
GLGSHVTVVGSPRRVAANAVAQFAVEVRGGGDGDGDEAARILHFNPRLRGDWSGRPVIEQNTRFRGQWGPALRCEGW
RSRPDEETVDGLVKCEQWGGNYGSKLNELKKMWFLNRVAGQRNRGSMDWPYPFVEDELFVLTLSTGLEGYHVQVDGR
HVASFPYRVGYSLEDAAILSVNGDVDIQSIVAGSLPMAYPRNAQRNLELLTELKAPPLPEEPIELFIGILSAGSHFT
ERMAVRRSWMSSVRNSSGAMARFFVALNGRKKVNEDLKKEANFFGDIVIVPFADSYDLVVLKTVAICEYATRVISAK
YIMKCDDDTFVRLDSVMADVRKIPYGKSFYLGNINYYHRPLREGKWAVSFEEWPREAYPPYANGPGYIVSSDIANFV
VSEMEKGRLNLFKMEDVSMGMWVGQFVDTVKAVDYIHSLRFCQFGCVDDYLTAHYQSPGQMACLWDKLAQGRPQCCN
PR
>LOC_Os03g58900.1
(SEQ ID NO: 169)
MPPPKRACRLALLAAGGAYLLFLLLFELPSVSISVSTASPAAAAAATTHRPRRRELEAASSSSSSSSSPLRPLKTAF
PSRRSPLAVSSIRFRRRNSSSIDASAASAFAAARPLMHHLLSSFSSPSPSSSPSPSPSTSDSCPSTISVPTHRLTSG
GGGGNGGGVTVELPCGMGVGSHVTVVARPRPARPESEPRIAERRGGEAAVMVSQFMVELLGTKAVQGEEPPRILHFN
PRIRGDFSGRPVIELNTCYRMQWAQPQRCEGWASQPHEETVDGQLKCERWIRDDNSKSEESNAQLWLNRLIGRGNEV
AADRPYPFEEGKLFALTVTAGLDGYHVNVDGRHVASFPYRTGYSLEDATGLSLKGDLDIESILAGHLPNSHPSFAPQ
RYLEMSEQWKAPPLPTEPVELFIGILSAANHFAERMAVRKSWMIDIRKSSNVVARFFVALNGEKEINEELKKEAEFF
SDIVIVPFMDSYDLVVLKTIAIAEYGVRIVPAKYIMKCDDDTFVRIDSVLDQVKKVEREGSMYIGNINYYHRPLRSG
KWSVSYEEWQEEVYPPYANGPGYVISSDIAQYIVSEFDNQTLRLFKMEDVSMGMWVEKFNSTRQPVKYSHDVKFFQS
GCFDGYYTAHYQSPQQMICLWRKLQFGSAQCCNMR
>LOC_Os05g11060.1
(SEQ ID NO: 170)
MPLHHHRHHHHSAAVAVAVADDDDEAKPRRPYSTFASPRAPTSAFSAAFSTHRLLVLFSVACLLVAAASLAFAFSAR
AATLQPPPLAAVAEATAKVAFRCGRAEDTLRAFLASSSGNYSSAAEGREREKVLAVVGVHTEIGSAARRAALRATWF
PPKPEGIVSLEHGTGLSFRFVVGRTKDKEKMADLQKEVDMYHDFLFVDAEEDTKPPQKMLAFFKAAYDMFDADFYVK
ADDAIYLRPDRLAALLAKDRLHQRTYIGCMKKGPVVNDPNMKWYESSWELLGNEYFSHASGLLYALSSEVVGSLAAT
NNDSLRMFDYEDVTIGSWMLAMNVKHEDNRAMCDSACTPTSIAVWDSKKCSNSCNTTEIVKALHNTTLCSKSPTLPP
EVEDE
>LOC_Os05g11060.2
(SEQ ID NO: 171)
MPLHHHRHHHHSAAVAVAVADDDDEAKPRRPYSTFASPRAPTSAFSAAFSTHRLLVLFSVACLLVAAASLAFAFSAR
AATLQPPPLAAVAEATAKVAFRCGRAEDTLRAFLASSSGNYSSAAEGREREKVLAVVGVHTEIGSAARRAALRATWF
PPKPEGIVSLEHGTGLSFRFVVGRTKDKEKMADLQKEVDMYHDFLFVDAEEDTKPPQKMLAFFKAAYDMFDADFYVK
ADDAIYLRPDRLAALLAKDRLHQRTYIGCMKKGPVVNDPNMKWYESSWELLGNEYFSHASGLLYALSSEVVGSLAAT
NNDSLRMFDYEDVTIGSWMLAMNVKHEDNRAMCDSACTPTSIAVWDSKKCSNSCNTTEIVKALHNTTLCSKSPTLPP
EVEDE
>LOC_Os05g47880.1
(SEQ ID NO: 172)
MSSSSSLYKQLGLGAGSPVSASHLLLLVLGAGFLALTVFVVHPNEFRIQSFFSGGCGRPGTDAATAAVAASPVKNVS
GGASDAAAATTAARSPDNDVRVLIGIQTLPSKYERRNLLRTIYSLQAREQPSLAGSVDVRFVFCNVTSPVDAVLVSL
EAIRHGDIIVLDCAENMDNGKTYTFFSTVARAFNSSDGEGSGSGSPPPPRYDYVMKADDDTYLRLAALVESLRGAAR
RDAYYGLQMPCDRENFYPFPPFMSGMGYALSWDLVQWVATAEESRRDHVGPEDMWTGRWLNLASKAKNRYDMSPRMY
NYRGASPPSCFRRDFAPDTIAVHMLKDAARWAETLRYFNATAALRPSHL
>LOC_Os06g09270.1
(SEQ ID NO: 173)
MSYLQKPSYYTISLVVVLLLPFTILFASFLLPFSAYLRGPPPIAAGSVVAGGCRHGAADGGGGGGGGGGVRPEISIL
VGVHTMAKKHSRRHLVRMAYAVQQTAALRGAARVDVRFALCARPMPQEHRAFVALEARAYGDVMLIDCDESPDKGKT
YDYFAGLPAMLSSGGGGGGGGEGRPYDYVMKVDDDTYLRLDELAETLRRAPREDMYYGAGLPFLDKESPPFMLGMGY
VLSWDLVEWIAGSDMAKALAIGAEDVTTGTWLNMGNKAKNRVNIFPRMYDFKGVKPEDFLEDTIGVHQLKQDLRWAQ
TLEHFNVTCLDPSSKMTNSLLS
>LOC_Os06g46570.1
(SEQ ID NO: 174)
MSWRRGDGGVARRWVLLLCTGSFFLGLLFTDRMWTLPEVTEVARPNGRREKEDELTAGDCNSAKVNVKRDYREILQT
QDTHHAVWTLDKTIAKLETELSAARTLQESFLNGSPVSEGHKGSDSTGRQKYLMVIGINTAFSSRQRRDSIRNTWMP
QGIKRRKLEEEKGIVIRFVIGHSAISGGIVERAIKAEERKHGDFMRIDHVEGYLELSGKTKTYFATAVSLWDADFYV
KVDDDVHVNIATLGQILSNHVKKPRVYIGCMKSGPVLSDKDVRYYEPEHWKFGDQYFRHATGQLYAISKDLATYISI
NKRVLHKYINEDVSLGAWFIGLDVEHIDERRLCCGTPPDCEWKAQAGNTCAVSFDWKCSGICDSVENMQWVHNRCGE
SEKSLWISSF
>LOC_Os06g46570.2
(SEQ ID NO: 175)
MSWRRGDGGVARRWVLLLCTGSFFLGLLFTDRMWTLPEVTEVARPNGRREKEDELTAGDCNSAKVNVKRDYREILQT
QDTHHAVWTLDKTIAKLETELSAARTLQESFLNGSPVSEGHKGSDSTGRQKYLMVIGINTAFSSRQRRDSIRNTWMP
QGIKRRKLEEEKGIVIRFVIGHSAISGGIVERAIKAEERKHGDFMRIDHVEGYLELSGKTKTYFATAVSLWDADFYV
KVDDDVHVNIATLGQILSNHVKKPRVYIGCMKSGPVLSDKDVRYYEPEHWKFGDQYFRHATGQLYAISKDLATYISI
NK
>LOC_Os07g09670.1
(SEQ ID NO: 176)
MPPPPRKRLGRAALLLAAAAYLAFLLLFELPSLDLFPSSDAAAGAAMPTHRPRRRELEASSSSSAFASPVLRRPATA
VSPAPASAAAAAAGALPIFSSLLLLPRPNATATPFDGTAAEAFAAARPHLDHLRTAAAAAAEEASSSSTAPTCPTSI
SVHADGLPGDGVRTVELPCGLAVGSHVTVVARPRAARPEYDPKIAERKSGQEPLMVSQFMVELVGTKAVDGEAPPRI
LHFNPRIRGDYSGKPVIEMNSCYRMQWGQSQRCEGYASRPADETVDGQLKCEKWIRDDDKKSEESKMKWWVKRLIGR
PKDVHISWPYPFAEGKLFVLTLTAGLEGYHVNVDGRHVTSFPYRTGYTLEDATGLSLNGDIDIESIFASSLPNSHPS
FAPERYLEMSEQWRAPPLPTEPVELFIGILSAASHFAERMAVRKSWMMYTRKSTNIVARFFVALNGKKEVNAELKRE
AEFFQDIVIVPFMDSYDLVVLKTIAIAEYGVRVIPAKYIMKCDDDTFVRIDSVLDQVKKVRSDKSVYVGSMNYFHRP
LRSGKWAVTYEEWPEEAYPNYANGPGYVISADIARYIVSEFDNQTLRLFKMEDVNMGMWVEKFNNTLRPVEYRHDVR
FYQSGCFDGYFTAHYQSPQHMICLWRKLQSGSSRCCNVR
>LOC_Os07g09670.2
(SEQ ID NO: 177)
MVSQFMVELVGTKAVDGEAPPRILHFNPRIRGDYSGKPVIEMNSCYRMQWGQSQRCEGYASRPADETVDGQLKCEKW
IRDDDKKSEESKMKWWVKRLIGRPKDVHISWPYPFAEGKLFVLTLTAGLEGYHVNVDGRHVTSFPYRTGYTLEDATG
LSLNGDIDIESIFASSLPNSHPSFAPERYLEMSEQWRAPPLPTEPVELFIGILSAASHFAERMAVRKSWMMYTRKST
NIVARFFVALNGKKEVNAELKREAEFFQDIVIVPFMDSYDLVVLKTIAIAEYGVRVIPAKYIMKCDDDTFVRIDSVL
DQVKKVRSDKSVYVGSMNYFHRPLRSGKWAVTYEEWPEEAYPNYANGPGYVISADIARYIVSEFDNQTLRLFKMEDV
NMGMWVEKFNNTLRPVEYRHDVRFYQSGCFDGYFTAHYQSPQHMICLWRKLQSGSSRCCNVR
>LOC_Os09g26300.1
(SEQ ID NO: 178)
MKTASSSSSSSHGFPATASLCTPYLLLVPLGLLAVVLVVPSLGSSHVRSDGLGVLCHAGPSTADGYLVTPGGDAASA
AAAAAETKAVVRPELRLLVGVLTTPKRYERRNIVRLAYALQPAVPPGVAQVDVRFVFCRVADPVDAQLVVLEAARHG
DILVLNCTENMNDGKTHEYLSSVPRMFASSPYDYVMKTDDDTYLRVAALVDELRHKPRDDVYLGYGFAVGDDPMQFM
HGMGYVVSWDVATWVSTNEDILRYNDTHGPEDLLVGKWLNIGRRGKNRYSLRPRMYDLNWDMDNFRPDTVLVHMLKD
NRRWAAAFRYFNVTAGLQPSNLYHFP
>LOC_Os09g26310.1
(SEQ ID NO: 179)
MAMKAPASSNSYLLLAPLALLLLAAVVFLLPSLNGARVGSDGGLGVLCARRSAGAEDYTVAAPAAPKEEEKPELSLL
VGVLTMPKRYERRDIVRLAYALQPAAARARVDVRFVFCRVADPVDAQLVALEAARHGDVVVLGGCEENMNHGKTHAY
LSSVPRLFASSPYDYVMKTDDDTYLRVAALADELRGKPRDDVYLGYGYAMGGQPMPFMHGMGYVVSWDVATWVSTAE
EILARNDTEGPEDLMVGKWLNLAGRGRNRYDLKPRMYDLSWDMDNFRPDTVAVHMLKDNRRWAAAFSYFNVTAGINL
HHLSP
>LOC_Os09g26320.1
(SEQ ID NO: 180)
MALSSLVVLSVSGCLSAPRSRPVVDNTNNDGGLGAETTAAREPEFRLLVGVLTTPSRYERRGILRLAYALQPAPGAQ
VDVRFVLCDVTDAADAVLVAAEAARHGDILVLDGCSTENMNDGKTHAYLSSVPRLFAPCPYDYVMKADDDTYLRVAA
LADELRGKPRRTSTSAGATPSATTRCRSCTAWATSCPGTSRAGCPPTRTSGRNRYNLKPRMYDINWDMDEFRPNTIA
VHRLKNNRRWAAVFRHFNVTVGIKPSTAARPHN
>LOC_Os12g16480.1
(SEQ ID NO: 181)
MCNQCLQGPYPLHTQALPQSYLDMSTVWQSSPLPNEPVDIFIGILSSGNHFAERMGVRKTWMSAVRNSPNVVARFFV
ALVHVVSARYVMKCDDDTFVRLDSIITEVNKVQSGRGLYIGNINFHHRSLRHGKWAVTYEEWPEEVYPPYANGPGYV
ISSDIAGAIVSEFRDRKLRVLSYSFLSGSATDWDESDGRRAAFVQVRSSVVAPRRQFNACWDWHLPDADDSGCVPAP
DPSLILGK
>LOC_Os12g41956.1
(SEQ ID NO: 182)
MKRARSSEVFLGGRGRARRRVAPLLAAVAFVYLLFVSFKLSGLAGIADPAAVTRPASGGAGEVVMPRRLEDPAPRAR
GDGDGVAVAGYGRITGEILRRRWEAGGRGRRRWGRGGNFSELERMADEAWELGGKAWEEACAFTGDVDSILSRDGGG
ETKCPASINIGGGDGETVAFLPCGLAVGSAVTVVGTARAARAEYVEALERRGEGNGTVMVAQFAVELRGLRAVEGEE
PPRILHLNPRLRGDWSHRPVLEMNTCFRMQWGKAHRCDGNPSKDDDQVDGLIKCEKWDRRDSVDSKETKTGSWLNRF
IGRAKKPEMRWPYPFSEGKMFVLTIQAGIEGYHVSVGGRHVASFPHRMGFSLEDATGLAVTGGVDVHSIYATSLPKV
HPSFSLQQVLEMSDRWKARPVPEEPIQVFIGIISATNHFAERMAIRKSWMQFPAIQLGNVVARFFVALSHRKEINAA
LKTEADYFGDVVILPFIDRYELVVLKTVAICEFGVQNVTAEYIMKCDDDTFVRLDVVLKQISVYNRTMPLYMGNLNL
LHRPLRHGKWAVTYEEWPEFVYPPYANGPGYVISIDIARDIVSRHANHSLRLFKMEDVSMGMWVEDFNTTAPVQYIH
SWRFCQFGCVHNYFTAHYQSPWQMLCLWNKLSSGRAHCCNYR
>LOC_Os02g31210.1
(SEQ ID NO: 183)
MSPLSLSFPSTLLPLSFFAWMWMALRLRRDREEGRRGRRLAGEERCGEEGRCDGRRHRCLLSRGWPRRSSPSTVGLD
AAQQSAPVHTPLHAPPRRGQAARRYSTDPVLVRPDDHARWEQGAEVTAVAVVVVLVEFDHAKTYYIGAPSESVEQDV
MHSYSMAFGGGGFAISYPAA
>LOC_Os03g16290.1
(SEQ ID NO: 184)
MVHLYPAAVPPHELQTPLRTFRAWSGSPAGPFTVNTRPEATPNATALPCHRKPIMFYLDRVTAMSTSTTNWTLTEYV
PEVLSGERCNTTGFDAATKVQMIQVIALKMNPAIWKRAPRRQCCKMQNANEGDKLIVKIHECKPDEATTSV
>LOC_Os06g19820.1
(SEQ ID NO: 185)
MATGGRRGRAVPLSKSFSRRLRHGRTGFGGSGHARGMMQLHVASAPSRCRRCWPTGGEETDGARWERRSGGRRYGGS
DDGDDAGAGEQGGGGGGEMSMVRYWRRSSVGAGSGSTAVDGGHGIASRPNAGASAGIARPRAISPTAVMNCNAPRAE
GQCGGDGVTDGCHRGGSGEAAEEGEIEDDGAVSAGVAQQSMEMPMRTFLNWYRCADYTAYVFNTRPLACQPCQMPQV
YYMRQSRLDRRRNTTVTEYERHRVAPVNCGWRIPDLATLLDRVIVLKKPDPDLWKRVIKHTP
>LOC_Os11g02650.1
(SEQ ID NO: 186)
MSACPVSLYFFPLFSPFPFSLSLFSLGALGRPAPPADGWGGDRRCEVGEEVRRPATWRRRRRGSRGTRRQRRRDVHG
EVSWGFAVVVTRTFLNWYRCADYTAYAFNTWPVACQPCQTPQVYYMQQSRLDRRRNTTVTVYERRRVVPAKCGWRIR
DPAALLDRVIVLKKPDPDL
>LOC_Os03g19310.1
(SEQ ID NO: 187)
MSKLQDRHGGEAAADVGRRARHQRLLLSFPVFPIVLLLLAPCTIFFFTSGDVPLPRIRIEYARRDAPTITAVAADTS
PPPPSPPSSSPPPLSFPPPPPPPSSPPPPALPVVDDHSDTQRSLRRLRQLTDSPYTLGPAVTGYDARRAEWLRDHTE
FPASVGRGRPRVLMVTGSAPRRCKDPEGDHLLLRALKNKVDYCRVHGFDIFYSNTVLDAEMSGFWTKLPLLRALMLA
HPETELLWWVDSDVVFTDMLFEPPWGRYRRHNLVIHGWDGAVYGAKTWLGLNAGSFIIRNCQWSLDLLDAWAPMGPP
GPVRDMYGKIFAETLTNRPPYEADDQSALVFLLVTQRHRWGAKVFLENSYNLHGFWADIVDRYEEMRRQWRHPGLGD
DRWPLITHFVGCKPCGGDDASYDGERCRRGMDRAFNFADDQILELYGFAHESLDTMAVRRVRNDTGRPLDADNQELG
RLLHPTFKARKKKTSPAARPM
>LOC_Os03g19330.1
(SEQ ID NO: 188)
MEKHGGKVTSDRRAGRRQHGQRCSASDAAPLVVVVILIVAALFLILGPTGSSSFTVPRIRVVFNEPVHVAVAAPPPP
PPPAQMQAGANASSEEDSGLPPPRQLTDPPYSLGRTILGYDARRSAWLAAHPEFPARVAPAGRPRVLVVTGSAPARC
PDPDGDHLLLRAFKNKVDYCRIHGLDVFYNTAFLDAEMSGFWAKLPLLRMLMVAHPEAELIWWVDSDAVFTDMLFEI
PWERYAVHNLVLHGWEAKVFDEKSWIGVNTGSFLIRNCQWSLDLLDAWAPMGPRGPVRDRYGELFAEELSGRPPFEA
DDQSALIYLLVTQRQRWGDKVFIESSYDLNGFWEGIVDKYEELRRAGRDDGRWPFVTHFVGCKPCRRYADSYPAERC
RRGMERAFNFADDQILKLYGFAHESLNTTAVRRVRNETGEPLDAGDEELGRLLHPTFRAARPT
>LOC_Os12g05380.1
(SEQ ID NO: 189)
MAVTGGGRPAVRQQAARGKQMQRTFNNVKITLICGFITLLVLRGTVGINLLTYGVGGGGGSDAVAAAEEARVVEDIE
RILREIRSDTDDDDDDEEEEPLGVDASTTTTTNSTTTTATAARRRSSNHTYTLGPKVTRWNAKRRQWLSRNPGFPSR
DARGKPRILLVTGSQPAPCDDAAGDHYLLKATKNKIDYCRIHGIEIVHSMAHLDRELAGYWAKLPLLRRLMLSHPEV
EWVWWMDSDALFTDMAFELPLARYDTSNLVIHGYPELLFAKRSWIALNTGSFLLRNCQWSLELLDAWAPMGPKGRVR
DEAGKVLTASLTGRPAFEADDQSALIHILLTQKERWMEKVYVEDKYFLHGFWAGLVDKYEEMMERHHPGLGDERWPF
VTHFVGCKPCGGYGDYPRERCLGGMERAFNFADNQVLRLYGFRHRSLASARVRRVANRTDNPLVNKEAALKMDAKIES
>LOC_Os02g17534.1
(SEQ ID NO: 190)
MGSAGGGGWDDDDDGDEQCATPPPPRSFSPMMMTEAGMKLVTPPWRRWRRWRGGCAESGRAVRAACVAAAVVLAVVV
LSYYARWGGDQDEMPTSLFTTRGSEGATSANLTDDQLLGGLLTAAFSPQSCRSRYEFAGYHKRKPPHKPSPYLVAKL
RSHEALQKRCGPGTAPYDKALRQLKSGDGAAAADGDDDCRYLVSISYNRGLGNRIIAIVSAFLYAVLTERALLVAPY
NGDVAALFCEPFPGTTWLLPDGGRRFPLLHLRDLDGKSKESLGALLKSNGIVSVAAGVNGSTSSSWSGRPPPPYVYL
HLDGGADYHDKLFYCDEQQRLLRGVPWLLMKTDSYLVPGLFLVPSLRGELERMFPEKDAVFHHLSRYLLHPANAVWH
AITAYHRDHLAGAGHLVGIQIRVYHEETPPVSQVVLDQVLSCARRENLLPAAGNTSSSDQAVLVTSLSSWYYEKIRD
ELGGGGGGVHQPSHEGLQRMGDTAHDMRALSEMYLLSTCDALLTTGFSTFGYVAQGLAGLRPWIMPRRPWWEKEAAT
AVPDPPCARVATPEPCFHSPSYYECAARRNYDDIGKVVPYVRRCEDVSWGIQLVNGSSQSQW
>LOC_Os02g17600.1
(SEQ ID NO: 191)
MEASLDQLPDQLSRGLEDAPPSNSNLTGDQLLGDLLSAAFSWQSCRSRHEALQVRCGPGTAPYEKALRQPKSGDGAI
AADGDDDDCRYVVSIVYDRGLGNRVIPIISAFLYAVLTERALLVAPYNGDVDALFCEPFPGTTWIHPGGRRFPLRRL
RDLDGKSRESLGTLLKSNAVSVDAGGNGTSSWSGRPPPYVYLHLDGGADYHDKLFYCDEQQRLLRGTPWLLMKTDSY
LVPGLFLVPSLRGELERMFPEKDAVFHHLSRYLLHPANAVWHAITAYHRDHLAGAGHLVGIQIRVYHEETPPVSQVV
LDQVLSCARREKLIPFPTAGTTTNTSSSDQAVLVTSLNSWYSDRIRDELGGGGGVHQPSHEGWQRMGDTAHDMRALS
EMYLLST
>LOC_Os02g25630.1
(SEQ ID NO: 192)
MRTTTRRRCDDCCSRLPTPLAKMLAWSVYGLPKWNFTNHINQRAKSQKLPYNMISGAGATCRGRGLDDEAEVEARDV
VERLDAAEEGRVWGRDGGAVEHGGVDLDLLILGAAGGVEAHPRGRHRRPLLTVERRGSREEGGEKVSNQITPPFSSP
SSLLPYLICEQFPGSTWTLPEGDFPFSGIRGFNACTRESLGNALRRGNALPETHYRHGCTCTCSTTYFNRNGNEPRF
FCDDGLDALWRVDWMVLLSDNYFVLGLFLVSRIERVLPRMFPCHDAAFHLLGRYLLHPRNVRTSCPVCSRSSTLPLP
ESSRAARPGRRKPVLVVSLHGAYSERIKDLYYEQDIAGRESMSVFQPTHLDRQQSGEKLHNQEEEEEYDKWGQGYF
>LOC_Os02g52590.1
(SEQ ID NO: 193)
MKSSKVQLHRAAAAASPSHGAPEDTPETSTRHDDDRLLGGLLSPAFDEHSCRSRYTSSLYRRRSPFRPSTYLVERLR
RYEARHKRCGPGSALFQEAVEHLRSGRNAARSECQYVVWTPFNGLGNRMLALASTFLYALLTDRVLLVHAPPEFDGL
FCEPFPGSSWTLPADFLITDFDGVFTMWSPTSYKNMRQAGTISNATAEQSLPAYVFLDLIQSFTDAAFCDDDQQVLA
KFNWMVIKSDVYFAAMLFLMPAYERELTQLFPEKEAVFHHLARYLFHPSNDVWGIVHRFYEAYLARADELVGLQVRV
FPEMPIPFDNMYEQIIRCSEQEGLLPKLGQTVVVTAANGSSVVAPSTKLTSILVTSLFPDYYDRIRGVYHARPTETG
EYVAVHQPSHEREQRTEARGHNQRALAEIYLLSFCDRVVTSAVSTFGYIAHGLAGVRPWVLLRPPSPVARAEPACVR
SETVEPCLQALPRRMCGAAEGSDIGALVPHIRHCEDVQKGIKLFS
>LOC_Os03g50800.1
(SEQ ID NO: 194)
MCPLSLSPPSSSFSLLATPAFSLPWQAARAGAAAGGDGGERRRRGSGGGRHWIGDGGLGNRILAAASAFLYAVLTAR
VLLVDTSNEMDELFSEPFPGTAWLLLRDFPLVLMRKTHTGLEGS
>LOC_Os04g37640.1
(SEQ ID NO: 195)
MSPSIRMAPAPSSSLATAGHGKTKSGRSSSSAVRPALLATAVSVMVVLLMAVLFGARWTPSGGHGGGADTSWVSAGA
RVVLNAVSSQQGADPVVKVAQPHDRLLGGLLSPDFNDTSCLSRYRASLYRRRSLHVLSSHLVSALRRYESLHRLCGP
GTSAYERAVARLRSPSSSNTTSDAPSECRYLVWTPHAGLGNRMLSITSAFLYALLTGRVLLFHRSGDDMKDLFCEPF
PGATWVLPEKDFPIRGMERFGIRTRESLGNALGRGEGGRDPPPPWMYVHLRHDYTRPGASDRLFFCDDGQDALRRVG
WVVVLLSDNYFVPGLFLIPRYERELSRMFPRRDAVFHHLGRYLFHPSNTVWGMVMRYHGSYLAKAEERVGVQVRTFSW
APISTDELYGQIVSCAQGENILPRVRESSSGSDNATAIPGSGRQQQQRPARRKAVLVVSLHGEYYERIRDMYYEHGA
AGGDAVSVFQPTHLGGQRSEERMHNQKALAEMMLLSFSDVALTSAASTFGYVSHGLAGLRPWVLMVPVRKKAPNPPC
RLAATVEPCFHTPPHYDCQARTKGDNGKTVRHVRHCEDLKDGVQLVD
>LOC_Os04g37650.1
(SEQ ID NO: 196)
MSPRVRMSVARWLPSSPAHGKTKSRRSSSAVRPTLLVIAVTVIAVLLVAVVFGGAGRWTLSGGGDTSWVSAGARVVI
NAVSGQQRDGDDPVAAAVEPRNDRLLGGLLSPDFDDSSCLSRYRAGLYRRQSPHAVSPHLVASLRRYESIHRRCGPG
TSAYERAVERLRSPPPSNTSDAECRYLVWTPLEGLGNRMLTLTSAFLYALLTDRVLLFHHPAGEGLRDLFCEPFPGS
TWTLPEGDFPFSGMQGFNARTRESLGNALRRGEGAAKDHPPPPPPWMYVHLRHDYNRNANDPRFFCDDGQDALRRVG
WVVLLSDNYFVPGLFLVPRFERALSRMLPRRDAAFHHLGRYLLHPSNTVWGMVARYHASYMACANERVGIQVRSFYW
ARISTDELYGQIMSCAHGENILPRVTQQGPNFTAAGDQPQPAARPGRRKAVLVVSLHGAYSERIKDLYYEHGAAGGE
SVSVFQPTHLDRQRSGEQLHNQKALAEMMLLSFSDVVVTSAASTFGYVGHGLAGLRPWVLMSPLDKKVPDPPCRLAA
TIEPCFHNPPNYDCRTRAKGDTGKIVRHIRHCEDFENGVQLVD
>LOC_Os06g10920.1
(SEQ ID NO: 197)
MATRGKKLGGVAGGGGAAVRVVGVVCVMAVPLFALLVLGGWASASTVWQSAARLTAVTAGFTNASKPSATGDAATGA
DELFGGLLAAGGCFDRGACLSRHESPRYYKSSPFSPSPYLLQKLRDYEARHRRCGPGTPGYAKSDEQLRSGHSSEVM
ECNYLVGLPYNGLGNRMLSLVASFLYALLTDRVFLVHFPDDFADHFCEPFPGGEGETATTWVLPPDFPVADLWRLGV
HSNQSYGNLLAAKKITGDPARETPVSVPPYVYLHLAHDLRGDDERFYCNDDQLVLAKVNWLLLQSDLYFVPSLYAIP
EFQDELRWMFPEKESVTHLLARYLLHPSNSVWGMVMRYHHAYLAPAAEMIGVQIRMFSWASIPVDDMYKQVMACSSQ
ERILPDTDGGDAPAPARTNTSGGGATTAILVASLQVEYYERLKGKYYEHAATASGGGRRWVGVFQPSHEEKQEMGKR
AHNQKALAEIYLLSFADVLLTSGMSTFGYMSSALAGLRPAMLLTAFNHKVPRTPCVRAVSMEPCFHKPPPAAATCQG
KLAVSENVTRHIKRCEDLAGGIKLFD
>LOC_Os06g10980.1
(SEQ ID NO: 198)
MDIDKLGEAAAAHPPEAEKRRGVAAPGAATVLVLVALPLMLVSYFFGDLAADTVVRLHRFKESSLSSSSPAAAADRL
LGGLLSPEFDEASCLSRYEASSRWKPSPFRVSPYLVERLRRYEANHRRCGPGTARYRDAVARLRSGDGDGDAECRYV
VWLPIQGLGNRMLSLVSTFLYALLTGRVVLVHEPPEMEGLFCEPFPGTSWLLPPDFPYKGGFSAASNESYVNMLKNG
VVRHDGDGGALPPYVYLHLEQIHLRLQNHTFCEEDHRVLDRFNWMVLRSDSYFAVALFLVPAYRAELDRMFPAKGSV
FHHLGRYLFHPGNRAWGIVERFYDGYLAGADERLGIQVRIVPQMAVPFDVMYEQILRCIREHGLLPQVTSTSESAGG
RPPPPPTATATKVKAVLVVSLKREYYDKLHGAYYTNATASGEVVAVYQPSHDGDQHTEARAHNERALAEIYLLSFSD
AVVTTAWSTFGYVAHALAGVRPWQLAPLDWGKMRADVACARPASVEPCLHSPPPLVCRARRDRDPAAHLPFLRHCED
VPAGLKLFD
>LOC_Os08g24750.1
(SEQ ID NO: 199)
MEMSGAGAGGVPTKLEHDDAAAVAAEREPCGGGAPRREEKERWRRVLVVGCLVALLLFAFFVLGRESASEVLQIASS
KLSAMNGGFTTKNPSHGGGAAKHADELLGGLLAPGMDRRSCRSRYQAAHYYKHFPYAPSPHLLDKLRAYEARHRRCA
PGTPLYNRSVEQLRSGRSAGGVECNYVVWLPFDGLGNRMLSMVSGFLYALLTDRVLLVDLPHDSSDLFCEPFPGATW
LLPPDFPVANLFGLGPRPEQSYTTLLNKKKITAVVNNDDDPASKNATAALPPPPAYVYLSLGYQMADKLFFCGDDQR
ALAKVNWLLLYSDLYFVPSLYSVAEFNGELRRLFPAKESACHLLARYLLHPTNAVWGMVTRYYNSYLAQASRRIGVQ
IRMFNFASIPVDDLYNQILTCSRQEHVLPETTTDNDNDDDLATAYDSNSSNGSGGGNYSAILIASLYPDYYERIRAT
YYEHATRGRVRVGVFQPTHEERQATQRLFHNQKALAEILLLGFSDELVTSGMSTFGYVGSSLAGVRPTILMPAHGHR
VPAPPCRRAVSMEPCNLTPPRVGEAECREMAAVVDKEDVARHVKVCEDFDRGVKFFD
>LOC_Os09g28460.1
(SEQ ID NO: 200)
MDSKPTRPHRRPPPLPSKTSGVWPVALLVVLCFAALPLFLALSRARPTLSDVSQMGVTVTVHDEDPAGTPPESSPAN
RDRLLGGLLSPDIGESACLSRYKSSLHRKPSPHSPSPYLVSRLRKYEALHRKCGPGTLFYKKSLMQLTSAYSMGLVE
CTYLVWTPCGGSHLGDRMLSMASAFLYALLTHRVFVVHVTDDMAGLFCEPFPAASWELPAGFLVHNLTQLGRGSEHS
YANLLGAKKIKTDDPAGVRSESLPSYAYVHLEHDYQQSDQLFFCDDDQTVLAKVNWLILRSNLYFTPGLFLVPQFED
ELRWMFPARDTVFHHIGRYLFHPSNKVWELITRYHTSYMAKFEENIGIQITTFAGSKVSSEEYFKQIVACTSQEKIL
PEIDPNATSSANEAALATTASKAVLVSSAQPSEYAEKLKAMYYEHATVTGEPVSVLQPAGAGKQAPNQKALVEMFLQ
SYCDVSVVSGRSTVGYVGHGLAGVKPWLLLTPTNRTASANPPCIQTTSMEPCFHAPPSYDCRAKKDGDLGAVLRHVR
HCEDVGDGLKLYD
>LOC_Os10g03650.1
(SEQ ID NO: 201)
MAEVGVIPVLPEPGPTTISAPRHTAADARGAPETESYNRAVQRLKDGSGKGSATEADARCGCSRATSRWCRSYANFS
ADSAESYGNMMKNKVLGTDGSDGDMPAAQMPAFAYLHLNHDYGDDDKMFFCDDDQRLVMRTDTYIVPSLFLVTTFQD
ELDALFPERGAVFHYLGRYLFPQANHTAVLQRVPRAGVAAAGRRPDCGSQALFCSSAAAAEDDTLTCAKPWRDILQI
LMSWLSINYFLESYVSLNRAKAALKGSYNPRGQEGWIWRSIESSLNQVAKEPKRRMGKDTGCARRGNRSRRCMEIRG
GEGGEGD
>LOC_Os02g28830.1
(SEQ ID NO: 202)
MGNALKDAGRVEEAINCYRSCLALQANHPQALTNLGNIYMEWNLISAAASFYKAAISVTSGLSSPLNNLAVIYKQQG
NYADAITCYTEVLRVDPTAADALVNRGNTFKEIGRVNEAIQDYIQAATIRPTMAEAHANLASAYKDSGHVETAIVSY
KQALRLRPDFPEATCNLLHTLQCVCDWENRNAMFRDVEEIIRKQIKMSVLPSVQPFHAIAYPIDPMLALEISCKYAA
HCSLIASRFGLPSFVHPPPVPVKAEGKHCRLRVGYVSSDFGNHPLSHLMGSVFGMHDRDNVEVFCYALSQNDGTEWR
QRIQSEAEHFVDVSAMTSDMIARIINQDKIQILINLNGYTKGARNEIFALQPAPIQVSYMGFPGTTGAAYIDYLVTD
EFVSPTCYSHIYSEKLVHLPHCYFVNDYKQKNRDCLDPVCPHKRSDYGLPEDKFIFACFNQLYKMDPEIFDTWCNIL
KRVPNSALWLLRFPAAGETRVRAHAAARGVRPDQIIFTDVAMKNEHIRRSSLADLFLDTPLCNAHTTGTDILWAGLP
MITLPLEKMATRVAGSLCLATGLGEEMIVSSMKEYEDRAVDLALNPAKLQALTNKLKEVRMTCPLFDTARWVRNLER
AYYKMWNLYCSGRHREPFKVIEDDNEFPYDR
>LOC_Os01g05400.1
(SEQ ID NO: 203)
MATPGPDELLKSHHILAKRREIRKREMEGVVVFADENSILRTELFDEVQKVKSVGAMPVGVLGEDEGTNEMFLQAPP
GCLPLTAGCYASSPVIASGEPEFAPAPFCRCPSDPRPPPPPSPSIRSLLPRADGDGYQEGNTWLSSSLCRIESLESL
STPLKNENDDSIFSLPTNIAVWAYDEGLLW
>LOC_Os01g06450.1
(SEQ ID NO: 204)
MDSEERSKKRLRLWSRAVVHFSLCFAIGVFAALLPLAATGATSIDSIRASFRPTVAATPPVPELDLLLIVTVTRPDD
DDDDGMSQEASLTRLGHTLRLVEPPLLWIVVGAENTTATARAVNALRGTRVMFRHLTYAAENFTGPAGDEVDYQMNV
ALSHIQLHRLPGVVHFAAASSVYDLRFFQQLRQTRGIAAWPIATVSSADQTVKLEGPTCNSSQITGWYSKDSSSNIT
ETTWDSSSNTTQTTWDSSSNKTQTTTLAALDTNASKQNSSSGPPEINMHAVGFKSSMLWDSERFTRRDNSSTGINQD
LIQAVRQMMINDEDKKRGIPSDCSDSQIMLWHLDMPRHTPKIEQATPEKESLTKGDEEESHDMTLDNVVPKTEEHET
LEKENLMKGDEKGSHDMMLDNVVAKIEEQETPEKENLTKGEEKESHDMMLDNVVAKIEEQETPEKENLTKGDEKESH
DMMLDNVVAKIDEQETTEKESLTKGDEKESHDMMLDNVVAKIEEQETPEKESLTKGDEKETHDMMLDNVVAKIEEQE
TPEEGKTKEG
>LOC_Os04g01280.1
(SEQ ID NO: 205)
MASIRRPHSPAKQQHLLRHGHLGPFASSSPPSSPLRHSSSSSSPRSAAHHHHHLLAAAGHTSFRRPLPRFAAFFLLG
SFLGLLHFLSHLPRPLGPIPNPNSHHRHRDPFPILQHPHPPSTPHSNHKLLIVVTPTRARPSQAYYLTRMAHTLRLL
HDSPLLWIVVQAGNPTPEAAAALRRTAVLHRYVGCCHNINASAPDFRPHQINAALDIVDNHRLDGVLYFADEEGVYS
LHLFHHLRQIRRFATWPVPEISQHTNEVVLQGPVCKQGQVVGWHTTHDGNKLRRFHLAMSGFAFNSTMLWDPKLRSH
LAWNSIRHPEMVKESLQGSAFVEQLVEDESQMEGIPADCSQIMNWHVPFGSESVVYPKGWRVATDLDVIIPLK
>LOC_Os04g58040.1
(SEQ ID NO: 206)
MGDEEEKGSRSRRMLIVVTTTRSDGGVRQRRNAALAHVEKHRLFSVVHFAHASGVYDAYFFDEIRQIERCHGRSPPP
GASLASCVCVVVVEGNDPAAVGSQEIAVPYRYTRYSSTCSRRKLGHGDVEEDEAEPSSPVGRHHIRARDWVSGRRET
PPQPRRETAAVLLSSSSSPIHLPRRDDAAAAIPNPHVCSVRACYATRAAASNSLPITGSIGLGDWEQFDVDHVHRAS
SELSMVAWSFTLPHHAGQCLVAQGLSAGLVLMHARL
>LOC_Os01g16460.1
(SEQ ID NO: 207)
MGAAAGSDERQMRPVVYVPSLFLVRARQSLWSAVAATGDRQRGGSNVDDRRLGEEARGVEGKEMGRPASRARRPASR
AGMPARRLASSAAGEEAAGARRCHADAGWRNTEIQPASMESNVDLRCQQTGAPAGECTSTSSLRGWYRLYSRSMDVC
KLVVNDGFGPALPSGGALPERDVYDTDQYMLALIYHTRMRRYECLTGERMARKKIRDAWSKLSPPPPDLSDTHDTRR
HRSRRAPSPSPASKLPPPPPLPPRPGGLVPSSAARLA
>LOC_Os01g70180.1
(SEQ ID NO: 208)
MGTRPCAGVASAVAAAVAVLLLAVSCFAAAATTTQKHGRMSGKGGDVLEDDPTGKLKVFVYEMPRKYNLNLLAKDSR
CLQHMFAAEIFMHQFLLSSPVRTLDPEEADWFYTPAYTTCDLTPQGFPLPFRAPRIMRSAVRYVAATWPYWNRTDGA
DHFFLAPHDFGACFHYQEERAIERGILPVLRRATLVQTFGQRHHPCLQPGSITVPPYADPRKMEAHRISPATPRSIF
VYFRGLFYDMGNDPEGGYYARGARASVWENFKDNPLFDISTEHPATYYEDMQRAIFCLCPLGWAPWSPRLVEAVVFG
CIPVIIADDIVLPFADAIPWGEISVFVAEEDVPRLDTILASVPLDEVIRKQRLLASPAMKQAVLFHQPARPGDAFHQ
ILNGLARKLPHPKGVFLEPGEKGIDWDQGLENDLKPW
>LOC_Os01g70180.2
(SEQ ID NO: 209)
MDVDVDCAGKGGDVLEDDPTGKLKVFVYEMPRKYNLNLLAKDSRCLQHMFAAEIFMHQFLLSSPVRTLDPEEADWFY
TPAYTTCDLTPQGFPLPFRAPRIMRSAVRYVAATWPYWNRTDGADHFFLAPHDFGACFHYQEERAIERGILPVLRRA
TLVQTFGQRHHPCLQPGSITVPPYADPRKMEAHRISPATPRSIFVYFRGLFYDMGNDPEGGYYARGARASVWENFKD
NPLFDISTEHPATYYEDMQRAIFCLCPLGWAPWSPRLVEAVVFGCIPVIIADDIVLPFADAIPWGEISVFVAEEDVP
RLDTILASVPLDEVIRKQRLLASPAMKQAVLFHQPARPGDAFHQILNGLARKLPHPKGVFLEPGEKGIDWDQGLEND
LKPW
>LOC_Os02g32110.1
(SEQ ID NO: 210)
MVGARAGRVPAAAAAAAAVLIVAACVFSSLAGAAAAAEVVGGAAQGNTERISGSAGDVLEDNPVGRLKVFVYDLPSK
YNKRIVAKDPRCLNHMFAAEIFMHRFLLSSAVRTLNPEQADWFYAPVYTTCDLTHAGLPLPFKSPRMMRSAIQFLSR
KWPFWNRTDGADHFFVVPHDFGACFHYQEEKAIERGILPLLRRATLVQTFGQKNHVCLKEGSITIPPYAPPQKMQAH
LIPPDTPRSIFVYFRGLFYDNGNDPEGGYYARGARASLWENFKNNPLFDISTEHPATYYEDMQRSVFCLCPLGWAPW
SPRLVEAVVFGCIPVIIADDIVLPFADAIPWDEIGVFVDEEDVPRLDSILTSIPIDDILRKQRLLANPSMKQAMLFP
QPAQPRDAFHQILNGLARKLPHPDSVYLKPGEKHLNWTAGPVADLKPWK
>LOC_Os03g05060.1
(SEQ ID NO: 211)
MRFSVVISSWILNRQLIKSAPKGGGRQQRRAKGMEKVAVGLLPPLRFIAVLAVVSWTSFIYCHFSLLSGGLLLGHGG
GDDGADPCRGRYIYVHDLPRRFNDDILRDCRKTRDHWPDMCGFVSNAGLGRPLVDRADGVLTGEAGWYGTHQFALDA
IFHNRMKQYECLTNQSAVADAVFVPFYAGFDFVRYHWGYDNATRDAASVDLTQWLMRRPEWRRMGGRDHFLVAGRTG
WDFRRDTNINPNWGTNLLVMPGGRDMSVLVLESSLLNGSDYAVPYPTYFHPRSDADVFRWQDRVRGMQRRWLMAFVG
APRPDDPKNIRAQIIAQCNATSACSQLGCAFGSSQCHSPGNIMRLFQKATFCLQPPGDSYTRRSVFDSMVAGCIPVF
FHNATAYLQYAWHLPREHAKYSVFISEHDVRAGNVSIEATLRAIPAATVERMREEVIRLIPSVIYADPRSKLETVRD
AFDVAVEGIIDRIAMTRGGYARSWLRPKQSRQALDARRRRLS
>LOC_Os03g05060.2
(SEQ ID NO: 212)
MEKVAVGLLPPLRFIAVLAVVSWTSFIYCHFSLLSGGLLLGHGGGDDGADPCRGRYIYVHDLPRRFNDDILRDCRKT
RDHWPDMCGFVSNAGLGRPLVDRADGVLTGEAGWYGTHQFALDAIFHNRMKQYECLTNQSAVADAVFVPFYAGFDFV
RYHWGYDNATRDAASVDLTQWLMRRPEWRRMGGRDHFLVAGRTGWDFRRDTNINPNWGTNLLVMPGGRDMSVLVLES
SLLNGSDYAVPYPTYFHPRSDADVFRWQDRVRGMQRRWLMAFVGAPRPDDPKNIRAQIIAQCNATSACSQLGCAFGS
SQCHSPGNIMRLFQKATFCLQPPGDSYTRRSVFDSMVAGCIPVFFHNATAYLQYAWHLPREHAKYSVFISEHDVRAG
NVSIEATLRAIPAATVERMREEVIRLIPSVIYADPRSKLETVRDAFDVAVEGIIDRIAMTRGGYARSWLRPKQSRQA
LDARRRRLS
>LOC_Os03g05070.1
(SEQ ID NO: 213)
MERTGAHGGKRLLPRLLFLAALSVTPWLLIFCLHFSVFDGAPPVSSPAARQSLVAVVSEGGEDSQRFLLEQEEQLRR
LPSARDVTTTTAAAVAGDAHACEGRYVYIHDLPPRFNDDILRNCREWYQWINMCVYLSNGGLGEPVDNADGAFADEG
WYATDHFGLDVIFHSRIKQYECLTDDSSRAAAVFVPFYAGFDVVQHLWGSNASVKDAASLELVDWLTRRPEWRSMGG
RDHFVMSGRTAWDHQRQTDSDSEWGNKFLRLPAVQNMTVLFVEKTPWTEHDFAVPYPTYFHPAKDAEIFQWQQRMRG
MKREWLFTFAGGTRPGDPNSIRHHLIRQCGASSLCNLIQCRKGEKKCLIPSTFMRVFQGTRFCLQPPGDTYTRRSAF
DAMLAGCVPVFFHPASAYTQYKWHLPDVHETYSVFIAEEDIRSGNVSVEETLRRIPPDVAEKMTETVISLVPRLLYA
DPRSKLETVKDAVDLTVEAVIERVKKLRKEMHGAGASSRLSTALGANTNGGFQSS
>LOC_Os03g08420.1
(SEQ ID NO: 214)
MYELPPRFNAEIVRDCRLYSRSMDVCKLVMNDGFGPAALPSGGALPERDVYDTDQYMLALIYHARMRRYECLTGESM
ARKKTRDARSKLAPPPPDLSDTTLAAIGADVRPRLLPHRSRRCRFLPHLAPGASSPAAPPGLPEKRREERKECKCAL
LGEEGIEINVGVEVVIDGVLNEGVDVLAIPEEGREKEGDNEGGDWGSGERHATARKEQLEEEGSVGRGLKLREALND
NMRRSIIYHLLTANLMLVNLIISSIWLVGS
>LOC_Os04g32670.1
(SEQ ID NO: 215)
MGSRTVGWWLLAAAVVLAAAAADSGEAERAAEQHSERISGSAGDVLEDNPVGRLKVFIYDLPRKYNKKMVNKDPRCL
NHMFAAEIFMHRFLLSSAVRTLNPKEADWFYTPVYTTCDLTPAGLPLPFKSPRVMRSAIQYISHKWPFWNRTDGADH
FFVVPHDFGACFHYQEEKAIERGILPLLQRATLVQTFGQENHVCLKEGSITIPPYAPPQKMQAHLIPPDTPRSIFVY
FRGLFYDTGNDPEGGYYARGARASLWENFKNNPLFDISTDHPPTYYEDMQRAVFCLCPLGWAPWSPRLVEAVVFGCI
PVIIADDIVLPFADAIPWEEIGVFVEEKDVPKLDTILTSMPIDDILRKQRLLANPSMKQAMLFPQPAQPRDAFHQIL
NGLARKLPHPEGVYLQPSDKRLNWTAGPVGDLKAW
>LOC_Os04g54100.1
(SEQ ID NO: 216)
MAAVAAATCDDTVGECDVDDEEEVEEMALMGAAGAAAGETGCRTLQRRLLDYLAARPEWRRSGGRDHVVLAHHPNGM
LDARYKLWPCVFVLCDFGRYPPSVVGLDKDVIAPYRHVVPNFAGQRLRRLR
>LOC_Os06g43160.1
(SEQ ID NO: 217)
MERSFRVFVYPDGDPGTFYQTPRKLTGKYASEGYFFQNIRESRFRTDDLEKAHLFFVPISPHKMRGKVPSSLLLVTY
AWLILHIRSYDRSILFLDLYWWCPLCSSFRGHWGVGADHFFVTCHDVGVRAFEGLPFIIKNSIRVVCSPSYNAGYIP
HKDVALPQILQPFALPAGGNDIENRTILGFWAGHRNSKIRVILARIWENDTELAISNNRINRAIGNLVYQKHFFRTK
FCVCPGGSQVNSARISDSIHYGCMPVILSDYYDLRFSGILNWRKFAVVLKESDVYELKSILKSLSQKEFVSLHKSLV
QVQKHFEWHSPPVPYDAFHMIMYELWLRHHVIKY
>LOC_Os06g46690.1
(SEQ ID NO: 218)
MASKNSCACHGVVVTLASCLLLVAAAVSVSVLAAHVAVGRVWSPAGAAAAAGHHHSLSPAWVPSPSSRHAHHARELV
NRRVQVGRMEAGLVQARVSIRRASRTRSCTPDDGGGFIPRGAVYRDAYAFHQSYIEMEKRFKVWTYREGEPPVVQKG
GAAFAGNDGIEGHLIAELDSSGGGGRHRARHPGEAHAFFLPISVASIAGYVYRRDMIDFWDPQLRLVAGYVDGLAAM
YPFWNRSRGADHFLVSCHQWAPILSAAKAELRGNAIRVMCDADMSDGFDPATDVALPPVVASARATPPQGRVASERT
VLAFFAAGGGGGGAVREALLARWEGRDDRVVVYGRLPAGVDHGELMRRARFCLCPCGGGEGAAAASRRVVEAITAGC
VPVLVDDGGYSPPFSDVLDWARFSVAVPAERVGEIKDILGGVSDRRYGVLRRRVLRVRRHFRLNRPPAKRFDVVNMV
IHSIWLRRLNLSLPY
>LOC_Os07g09050.3
(SEQ ID NO: 219)
MRASSFSSLMLPCSHGHGGGRATASTCAAAAAACLALVALVILVVSMDPRAQASSWFFLSSSSSSSSSSSSTLVRPA
ASSHAASLRKPSSWGGGNGGGGGGEHLLVTSSSFGSGGGARGSWSRNSTSKEVLFQGGGGGGGDEMTSTAAAPTPAL
IIGSSSGDGVSPSRVAVTAAAAEPTPALAPAPAPEWGVGDAASGDDIIQVMPQAQRRRDVKLELLELGLAKARATIR
EAIYLECVPVVIGDDYTLPFADVLNWAAFSVRVAVGDIPRLKEILAAVSPRQYIRMQRRVRAVRRHFMVSDGAPRRF
DVFHMILHSIWLRRLNVRVIARED
>LOC_Os10g10080.1
(SEQ ID NO: 220)
MGTRRRSARARARPPLAMPLAVLLLFACSSGVAAAAAQGIERIKDDPVGKLKVYVYELPPKYNKNIVAKDSRCLSHM
FATEIFMHRFLLSSAIRTSNPDEADWFYTPVYTTCDLTPWGHPLTTKSPRMMRSAIKFISKYWPYWNRTEGADHFFV
VPHDFAACFYFQEAKAIERGILPVLRRATLVQTFGQKNHACLKDGSITVPPYTPAHKIRAHLVPPETPRSIFVYFRG
LFYDTSNDPEGGYYARGARASVWENFKNNPMFDISTDHPQTYYEDMQRAVFCLCPLGWAPWSPRLVEAVVFGCIPVI
IADDIVLPFSDAIPWEEIAVFVAEDDVPQLDTILTSIPTEVILRKQAMLAEPSMKQTMLFPQPAEPGDGFHQVMNAL
ARKLPHGRDVFLKPGQKVLNWTEGTREDLKPW
>LOC_Os10g10080.2
(SEQ ID NO: 221)
MPLAVLLLFACSSGVAAAAAQGIERIKEDDPVGKLKVYVYELPPKYNKNIVAKDSRCLSHMFATEIFMHRFLLSSAI
RTSNPDEADWFYTPVYTTCDLTPWGHPLTTKSPRMMRSAIKFISKYWPYWNRTEGADHFFVVPHDFAACFYFQEAKA
IERGILPVLRRATLVQTFGQKNHACLKDGSITVPPYTPAHKIRAHLVPPETPRSIFVYFRGLFYDTSNDPEGGYYAR
GARASVWENFKNNPMFDISTDHPQTYYEDMQRAVFCLCPLGWAPWSPRLVEAVVFGCIPVIIADDIVLPFSDAIPWE
EIAVFVAEDDVPQLDTILTSIPTEVILRKQAMLAEPSMKQTMLFPQPAEPGDGFHQVMNALARKLPHGRDVFLKPGQ
KVLNWTEGTREDLKPW
>LOC_Os10g10080.3
(SEQ ID NO: 222)
MFATEIFMHRFLLSSAIRTSNPDEADWFYTPVYTTCDLTPWGHPLTTKSPRMMRSAIKFISKYWPYWNRTEGADHFF
VVPHDFAACFYFQEAKAIERGILPVLRRATLVQTFGQKNHACLKDGSITVPPYTPAHKIRAHLVPPETPRSIFVYFR
GLFYDTSNDPEGGYYARGARASVWENFKNNPMFDISTDHPQTYYEDMQRAVFCLCPLGWAPWSPRLVEAVVFGCIPV
IIADDIVLPFSDAIPWEEIAVFVAEDDVPQLDTILTSIPTEVILRKQAMLAEPSMKQTMLFPQPAEPGDGFHQVMNA
LARKLPHGRDVFLKPGQKVLNWTEGTREDLKPW
>LOC_Os10g32080.1
(SEQ ID NO: 223)
MAASVVSDKSSGGASLLRPSRVLFLAVLSTAFWSVIFYAHHSAVQGNATMASVLLRPSSFSRPLLTSFRLIGGGLDR
CAGRRVYMYELPPRFNAELVRDCRLYSRSMDVCKLVVNDGFGPALPGGGALPERDVYDTDQYMLALIYHARMRRYEC
LTGDAAAADAVFVPFYAGFDAAMNLMKSDLAARDALPRQLAEWLVRRPEWRAMGGRDHFMVAARPVWDFYRGGDDGW
GNALLTYPAIRNTTVLTVEANPWRGIDFGVPFPSHFHPTSDADVLRWQDRMRRRGRRWLWAFAGAPRPGSTKTVRAQ
IIEQCTASPSCTHFGSSPGHYNSPGRIMELLESAAFCVQPRGDSYTRKSTFDSMLAGCIPVFLHPASAYTQYTWHLP
RDYRSYSVFVPHTDVVAGGRNASIEAALRRIPAATVARMREEVIRLIPRITYRDPAATLVTFRDAFDVAVDAVLDRV
ARRRRAAAEGREYVDVFDGHDSWKHNLLDDGQTQIGPHEFDPYL
>LOC_Os10g32110.1
(SEQ ID NO: 224)
MAILSAVFWFLVFSLLSGMPGGGDLSSVLFRPSSLSLPLLNSFTFDQNPSPEQQPPPAPAPAEDRCAGRYIYMYDMP
ARFNEELLRDCRALRPWTAEGMCRYVANGGMGEPMGGDGGGIFSERGWFDTDQFVLDIIFHGRMKRYGCLTGDPAAA
AAVFVPFYGSCDLGRHIFHRNASVKDALSEDLVGWLTRRSEWRAMGGRDHFFVAGRTTWDFRRERDEGWEWGSKLLN
YPAVQNMTAILVEASPWSRNNLAVPYPTYFHPETAADVAAWQRRVRAAARPWLFSFAGGPRKGNGTIRADIIRQCGA
SSRCNLFHCHGAAASGCNAPGAVMRVFESSRFCLEPRGDTMTRRSTFDAILAGCIPVFFHPGSAYTQYTLHLPPERG
GWSVLIPHADVTGRNVSIEETLAAISPEKVRSMREEVIRLIPTVVYADTRSSRVDFRDAFDVAVDAVVGRVARRRRD
EPDARR
>LOC_Os10g32160.1
(SEQ ID NO: 225)
MKRHNAAEVPVPVSYGGERDEKTGSKVDKMGGGAARRWRSGGCCSRLWLVLVVFATVTMLLRHRYDSGLGHGAAAVV
RIEPVHRKVKPADRGGARPSFSDSGSAKPVTVDHKSATTDSSTGTESDGGGEPSSASSSLPAAAHPFSRALAAAGDK
GDRCGGRYVYVQELPPRFNTDMVKNCVALFPWKDMCKFTANGGFGPPMSGGGGMFQETGWYNSDKYTVDIIFHERMR
RYECLTDDPSLAAAVYVPFFAGLEVWRHLWGFNATARDAMALEVVDIITSRPEWRAMGGRDHFFTAGLITWDFRRLA
DGDAGWGSKLFSLPAIKNMTALVVEASPWHLNDAAIPFPTAFHPASDEAVFVWQDKVRRLERPWLFSFAGAARPGSA
KSIRSELITQCRASSACSLMECRDGPSNKCGSAASYMRLFQSSTFCLQPQGDSYTRKSAFDAMLAGCIPVFFHPGTA
YVQYTWHLPRNHADYSVYISEDDVRRNASIEERLRRIAPAAVERMRETVISLIPTVVYAQPSSRLDTMKDAFDVAVD
AIVDKVTRLRRDIVDGRGEEEKLEMYSWKYPLLREGQKVEDPHEWDSLFAFA
>LOC_Os10g32170.1
(SEQ ID NO: 226)
MKRHNTAEVPVPVSYGGKVEKTMGGAKQGRGGGGGCCSRLWFMVVLSATVTLLVRHCYDSGVIGHGAAAGGVVRIEP
VHRGLYHTRKASPVDRGGGGGGTSFSGHSPSPPDAGGSAKPESPHDSGVKAPSELTTVEHTKQPSEPASTGTESDDG
GKPSSASSSSLPAAAHPFARALAAAGDKGDRCGGRYVYVQELPPRFNTDMVKNCATLFPWTDMCAFTANGGFGPQMS
GGDGGVFQETGWYNSDQYTVDIIFHDRIRRYECLTDDPSLAAAVYVPFFAGLEVARHLWGFNVTTRDAMALEVVDII
TSRSEWRAMGGRDHFFTAGRTTWDFRRLNDGDAGWGSKLFSLPAIKNMTALVVEASPWHLNDAAIPFPTAFHPASDE
AVFVWQDKVRRLERPWLFSFAGAARPGSAKSIRSELIAQCRASSVCSLMECADGPSNKCGSPASYMRLFQSSTFCLQ
PQGDSYTRKSAFDAMLAGCIPVFFHPGTAYVQYTWHLPRNHADYSVYISEDDVRRNASIEERLRRIAPAAVERMRET
VISLIPTVVYAQPSSRLDTMKDAFDVAVDAIVDKVTRLRRDIVDGRGEEEKLEMYSWKYPLLREGQKVEDPHEWDPL
FAFG
>LOC_Os12g12290.1
(SEQ ID NO: 227)
MEANYPKYVLYGLLIVGSWLLSCLLHFQVFHLSLFPYPSYLLSRRVVLPLALNARFLPPRPDVAGDDDGGIVRRRSS
SPAKAAAEASCDGRYVYVLEVPRRFQMLTECVEGPKVFDDPYHVCVVMSNSGLGPVIPPAAAGNATVDGDIIPNTGW
YNTDQYALEVIFHNRMRRYECLTSDMAAATAVYVAFYPALELNRHKCGSSATERNEPPREFLRWLTSQPSWAALGGR
DHFMVAARTTWMFRRGGAGDSLGCGNGFLSRPESGNMTVLTYESNIWERRDFAVPYPSYFHPSSAREVSAWQATARA
ARRPWLFAFAGARRANGTLAIRDHIIDECTASPPGRCGMLDCSHGLEGSITCRSPRRLVALFASARFCLQPPGDSFM
RRSSIDTVLAGCIPVFFHEASTFKKQYQWHERDADADNDNATVDRRRYSVVIDPDDVVEGRVRIEEVLRRFSDDEVA
AMREEVIRMIPRFVYKDPRVRFEGDMRDAFDITFDEIMARMRRIKNGEILGWKLDGDDDVVAKDS
>LOC_Os12g16230.1
(SEQ ID NO: 228)
MPLTLFFFLLSFLPLTRVAFFAAGGGAMREVLLTRWEGRDDQVLLYGLLPAGVDHGELMGRARFCLCPTGDDEGAAA
ASRRVVEAITVGCCAVDSAVSFLRRRHR
>LOC_Os12g38450.1
(SEQ ID NO: 229)
MDGSHGSAAALRATGRCLAPLIIPASCVVWVLFFFPSPSPDVAVRRDGFLPAVTLPVQRAGDTPPPPPIIDASPPPP
STSPPPPPPRRGRPARRDRCAGRYVYMHELPSRFNSDLLRDCRTLSEWTDMCRHVANGGIGPRLPPAARGGVLPATG
WYDTNQFTLEVIFHARMRRYGCLTADASRAAAVYVPYYPGLDVGRYLWGFSNGVRDLLAEDLAEWLRGTPAWAAHGG
RDHFLVGGRIAWDFRREDGGGEGSQWGSRLLLLPEAMNMTALVIEASPWHRRTDVAVPYPTYFHPWRPSDVSSWQRD
ARRARRPWLFAFAGAGRGNGDDHDRHHGGGVVRDRVIAQCARSRRCGLLRCGARGRRDDCYDPGNVMRLFKSAAFCL
QPRGDSYTRRSVFDAILAGCVPVFFHPGSAYTQYRWHLPRDHAAYSVFVPEDGVRNGTVRLEDVLRRVSAARVAAMR
EQVIRMIPTVVYRDPRAPSARGFTDAIDVAVDGVIERVRRIKQGLPPGGDDDDDHRWDAYFDTQ
>LOC_Os01g34880.1
(SEQ ID NO: 230)
MREGNVTHHEYMQVGKGRDVGMNQISSFEAKVANGNGEQTLSRDIYRLGRRFDFYRMLSFYFTTVGFYFSSMVTVLT
VYVFLYGRLYLVMSGLERSILLDPRIEQNIKPLENALASQSFFQLGLLLVLPMVMEVGLEKGFRTALGEFVIMQLQL
ASVFFTFQLGTKTHYYGRTILHGGAKYRPTGRGFVVYHAKFADNYRMYSRSHFVKGLELLILLVVYLVYGSSYRSSS
MYLFVTFSIWFLVASWLFAPFIFNPSCFEWQKTVDDWTDWRKWMGNRGGIGMSVDQSWEAWWISEQEHLRKTSIRSL
LLEIILSLRFLIYQYGIVYHLNIARRSKSILVYGLSWLVMLSVLVVLKMVSIGRQKFGTDLQLMFRILKGLLFLGFV
SVMAVLFVVCNLTISDVFASILGFMPTGWCILLIGQACSPLVKKAMLWDSIMELGRSYENLMGLVLFLPIGLLSWFP
FVSEFQTRLLFNQAFSRGLQISRILAGQKDIGEE
>LOC_Os01g34890.1
(SEQ ID NO: 231)
MPMGSRLGASPEMIERNMSLMLLLIVEKTGPFDIYAKEVEKEKASFSHYNILPLNISGQRQPVMEIPEIKAAVDLLR
KIDGLPMPRLDPVSAEKETDVPTVRDLFDWLWLTFGFQKGNVENQKEHLILLLANIDMRKGANAYQSDRHNHVMHSD
TVRSLMRKIFENYISWCRYLHLESNIKIPNDASTQQPEILYIGLYLLIWGEASNVRFMPECICYIFHHSHQYKNTII
PMCLFMEHVRQDFDPPFRREGSDDAFLQLVIQPIYSVMKQEAAMNKRGRTSHSKWRNYDDLNEYFWSKRCFKQLKWP
MDSAADFFAVPLKIKTEEHHDRVITRRRIPKTNFVEVRTFLHLFRSFDRMWAFFILAFQAMVIVAWSPSGLPSAIFD
PTVFRNVLTIFITAAFLNFLQATLEIILNWKAWRSLECSQMIRYILKFVVAVAWLIILPTTYMSSIQNSTGLIKFFS
SWIGNLQSESIYNFAVALYMLPNIFSALFFIFLPFRRVLERSNSRIIRFFLWWTQPKLYVARGMYEDTCSLLKYTLF
WILLLICKLAFSFYVEIYPLVGPTRTIMFLGRGQYAWHEFFPYLQHNLGVVITVWAPIVMVYFMDTQIWYAIFSTIC
GGVNGAFSRLGEIRTLGMLRSRFEAIPIAFGKHLVPGHDSQPKRHEHEEDKINKFSDIWNAFIHSLREEDLISNRER
NLLIVPSSMGDTTVFQWPPFLLASKIPIALDMANSVKKRDEELRKRINQDPYTYYAVVECYQTLFSILDSLIVEQSD
KKVVDRIHDRIEDSIRRQSLVKEFRLDELPQLSAKFDKLLNLLLRTDEDIEPIKTQIANLLQDIMEIITQDIMKNGQ
GILKDENRNNQLFANINLDSVKDKTWKEKCVRLQLLLTTKESAIYVPTNLDARRRITFFANSLFMKMPKAPQPFCFC
ISVLTPYFKEEVLFSAEDLYKKNEDGISILFYLRKIYPDEWKNFLERIEFQPTDEESLKTKMDEIRPWASYRGQTLT
RTVKLEHRRTVESSQQGWASFDMARAIADIKFTYVVSCQVYGMQKTSKDPKDKACYLNILNLMLMYPSLRVAYIDEV
EAPAGNGTTEKTYYSVLVKGGEKYDEEIYRIKLPGKPTDIGEGKPENQNHAIVFTRGEALQAIDMNQDNYLEEAFKM
RNVLEEFESEKYGKRKPTILGLREHIFTGSVSSLAWFMSNQETSFVTIGQRVLANPLNFYGPSFIDRHH
>LOC_Os01g34930.1
(SEQ ID NO: 232)
MCIMQISFVLCSKLMVVLIKGFNSTLRQGNVTHHEYIQLGKGRDVGMNQISNFEAKVANGNGEQTLCRDIYRLGHRF
DFYRMLSLYFTTVGFYFNSMVAVLTVYVFLYGRLYLVLSGLEKSILQDPQIKNIKPFENALATQSIFQLGMLLVLPM
MIEVGLEKGFGRALGEFVIMQLQLASVFFTFHLGTKTHYYGRTILHGGAKYRGTGRGFVVRHAKFAENYRMYSRSHF
VKALELLILLVVYLAYGISYRSSSLYLYVTISIWFLVFCWLFAPFVFNPSCFEWHKTVDDWTDWWHWMSNRGGIGLA
PEQSWEAWWISEHDHLRNGTIRSLLLEFVLSLRFLIYQYGIVYHLHIVHGNRSFMVYALSWLVIAIVLVSLKVVSMG
REKFITNFQLVFRILKGIVFIVLISLVVILFVVFNLTVSDVGASILAFIPTGWFILQIAQLCGPLFRRLVTEPLCAL
FCSCCTGGTACKGRCCARFRLRSRDVLRKIGPWDSIQEMARMYEYTMGILIFFPIAVLSWFPFVSEFQTRLLFNQAF
SRGLQISRILTGQNGSGSKRD
>LOC_Os01g48200.1
(SEQ ID NO: 233)
MFEAKVASGNGEQTLSRDVYRLGHRLDFFRMLSFFYTTIGFYFNTMMVVLTVYAFVWGRFYLALSGLEAFISSNTNS
TNNAALGAVLNQQFVIQLGIFTALPMIIENSLEHGFLTAVWDFIKMQLQFASVFYTFSMGTKTHYYGRTILHGGAKY
RATGRGFVVEHKKFAENYRLYARSHFIKAIELGVILTLYASYGSSSGNTLVYILLTISSWFLVLSWILAPFIFNPSG
LDWLKNFNDFEDFLNWIWFRGGISVKSDQSWEKWWEEETDHLRTTGLFGSILEIILDLRFFFFQYAIVYRLHIAGTS
KSILVYLLSWACVLLAFVALVTVAYFRDKYSAKKHIRYRLVQAIIVGATVAAIVLLLEFTKFQFIDTFTSLLAFLPT
GWGIISIALVFKPYLRRSEMVWRSVVTLARLYDIMFGVIVMAPVAVLSWLPGLQEMQTRILFNEAFSRGLHISQIIT
GKKSHGV
>LOC_Os02g14900.1
(SEQ ID NO: 234)
MEVEIVEQRWRPTPTPLPPPPPPLPPPPAASAASSSGAGDAAAVASAANQFDSEKLPQTLVSEIRPFLRVANQIEHE
SPRVAYLCRFHAFEKAHMMDPRSTGRGVRQFKTALLQRLEQDEKSTFTKRMAKSDSQEIRLFYEKKEKADERELLPV
LAEVLRAVQIGTGKEKQKRIASETFADKSALFRYNILPLYPGSTKQPIMLLPEEKKGNVANQREHLILLLANMHARL
NPKSSSETMLDDRAVDELLAKTFENYLTWCKFLGRKSNIWLPSVKQEIQQHKLLYISLYLLIWGEASNLRLMPECLC
YIFHHESLKNKNGVSDHSTWRNYDDLNEFFWSADCFKLGWPMRLNNDFFFTSNKNKNSRLPIVPPVQQTEQQINQLR
TSQQTDQQNTQLRTSQQTEQRNTQLRTPNGSSSFQNMLNPEAPGQTQQQTTSDTSQQKWLGKTNFVEVRSFWHIFRS
FDRMWTLLVLGLQFFRDIYLENLQYVSLVVSVKSNAGAILAVWAPIILVYFMDTQIWYSVFCTIFGEMDLMTMPMSL
EHRSGSIRWPMFLLAKKFSEAVDMVANFTGKSTRLFCIIKKDNYMLCAINDFYELTKSILRHLVIGDVEKSFSSACP
CEYYYDVLQILSRVIAAIYTEIEKSIQNASLLVDFKMDHLPSLVAKFDRLAELLYTNKQELRYEVTILLQDIIDILV
QDMLVDAQSVLGLINSSETLISDDDGTFEYYKPELFASISSISNIRFPFPENGPLKEQVKRLYLLLNTKEKVVEVPS
NLEARRRISFFATSLFMDMPSAPKVSNEWRNFLERLGPKVTQEEIRYWASFHGQTLSRTVRGMMYYRKALRLQAFLD
RTNDQELCKGPAANGRQTKNMHQSLSTELDALADMKFSYVISCQKFGEQKSSGNPHAQDIIDLMTRYPALRVAYIEE
KEIIVDNRPHKVYSSVLIKAENNLDQEIYRIKLPGPPLIGEGKPENQNHAIIFTRGEALQTIDMNQDNYLEEAYKMR
NVLQEFVRHPRGKAPTILGLREHIFTGSVSSLAGFMSYQETSFVTIGQRFLADPLRVRFHYGHPDIFDRMFHLTRGG
ISKASKTINLSEDVFAGYNSILRRGHITYNEYIQVGKGRDVGLNQISKFEAKVANGNSEQTLSRDIHRLGRRFDFFR
MLSCYFTTVGFYFNSLISVVGVYVFLYGQLYLVLSGLQRALLIEAETQNMKSLETALVSQSFLQLGLLTGLPMVMEL
GLEKGFRVALSDFILMQLQLASVFFTFSLGTKAHYYGRTILHGGAKYRPTGRKFVAFHASFTENYQLYSRSHFVKGF
ELVFLLIIYHIFRRSYVSTVVHVMITYSTWFMAVTWLFAPFLFNPAGFAWRKIVEDWADWTIWMRNQGGIGVQPEKS
WESWWNAENAHLRHSVLSSRILEVLLSLRFFMYQYGLVYHLKISQDNKNFLVYLLSWVVIIAIVGLVKLVNCASRRL
SSKHQLVFRLIKLLIFLSVMTSLILLSCLCQLSIMDLIICCLAFIPTGWGLLLIVQVLRPKIEYYAIWEPIQVIAHA
YDYGMGSLLFFPIAALAWMPVISAIQTRVLFNRAFSRQLQIQPFIAGKTKRR
>LOC_Os03g02756.1
(SEQ ID NO: 235)
MNQDNYFEEALKMRNLLEEFYQNHGKHKPSILGVREHVFTGSVSSLASFMSNQETSFVTLGQRVLANPLKVRMHYGH
PDVFDRIFHITRGGISKASRVINISEDIYAGFNSTLRLGNITHHEYIQVGKGRDVGLNQIALFEGKVAGGNGEQVLS
RDIYRLGQLFDFFRMLSFYVTTIGFYFCTMLTVWTVYIFLYGKTYLALSGVGESIQNRVDILQNTALNAALNTQFLF
QIGVFTAIPMILGFILEFGVLTAFVSFITMQFQLCSVFFTFSLGTRTHYFGRTILHGGAKYRATGRGFVVRHIKFAE
NYRLYSRSHFVKGLEVALLLVIFLAYGFNNGGAVGYILLSISSWFMAVSWLFAPYIFNPSGFEWQKVVEDFRDWTNW
LFYRGGIGVKGEESWEAWWDEELAHIHNVGGRILETVLSLRFFIFQYGVVYHMDASESSKALLIYWISWAVLGGLFV
LLLVFGLNPKAMVHFQLFLRLIKSIALLMVLAGLVVAVVFTSLSVKDVFAAILAFVPTGWGVLSIAVAWKPIVKKLG
LWKTVRSLARLYDAGTGMIIFVPIAIFSWFPFISTFQTRLLFNQAFSRGLEISLILAGNNPNAGV
>LOC_Os03g02756.2
(SEQ ID NO: 236)
MNQDNYFEEALKMRNLLEEFYQNHGKHKPSILGVREHVFTGSVSSLASFMSNQETSFVTLGQRVLANPLKVRMHYGH
PDVFDRIFHITRGGISKASRVINISEDIYAGFNSTLRLGNITHHEYIQVGKGRDVGLNQIALFEGKVAGGNGEQVLS
RDIYRLGQLFDFFRMLSFYVTTIGFYFCTMLTVWTVYIFLYGKTYLALSGVGESIQNRVDILQNTALNAALNTQFLF
QIGVFTAIPMILGFILEFGVLTAFVSFITMQFQLCSVFFTFSLGTRTHYFGRTILHGGAKYRATGRGFVVRHIKFAE
NYRLYSRSHFVKGLEVALLLVIFLAYGFNNGGAVGYILLSISSWFMAVSWLFAPYIFNPSGFEWQKVVEDFRDWTNW
LFYRGGIGVKGEESWEAWWDEELAHIHNVGGRILETVLSLRFFIFQYGVVYHMDASESSKALLIYWISWAVLGGLFV
LLLVFGLNPKAMVHFQLFLRLIKSIALLMVLAGLVVAVVFTSLSVKDVFAAILAFVPTGWGVLSVSFYRNINVHLRQ
DGAKVNSVLKIVPA
>LOC_Os01g07720.2
(SEQ ID NO: 237)
MTFLHAAMVLIMYHKWYLGLVIFSAAVSIKMNVLLFAPSLLLLMLKAMSIKGVFFALLGAAALQVLLGMPFLLSHPV
EYISRAFNLGRVFIHFWSVNFKFVPEKFFVSKELAVALLVLHLTTLLVFAHYKWLKHEGGLFHFLHSRFKDATSIGQ
LIFAKPKLSTLNKEHIVTVMFVGNFIGIVCARSLHYQFYSWYFYSLPFLLWKTRFPTFVRVILFLAVELCWNIYPST
AYSSLLLLFIHISILFGLWSSPAEYPYANGKK
>LOC_Os01g07720.3
(SEQ ID NO: 238)
MTFLHAAMVLIMYHKWYLGLVIFSAAVSIKMNVLLFAPSLLLLMLKAMSIKGVFFALLGAAALQVLLGMPFLLSHPV
EYISRAFNLGRVFIHFWSVNFKFVPEKFFVSKELAVALLVLHLTTLLVFAHYKWLKHEGGLFHFLHSRFKDATSIGQ
LIFAKPKLSTLNKEHIVTVMFVGNFIGIVCARSLHYQFYS
>LOC_Os01g07720.4
(SEQ ID NO: 239)
MTFLHAAMVLIMYHKWYLGLVIFSAAVSIKMNVLLFAPSLLLLMLKAMSIKGVFFALLGAAALQVLLGMPFLLSHPV
EYISRAFNLGRVFIHFWSVNFKFVPEKFFVSKELAVALLVLHLTTLLVFAHYKWLKHEGGLFHFLHSRFKDATSIGQ
LIFAKPKLSTLNKEHIVTVMFVGNFIGIVCARSLHYQFYS
>LOC_Os01g02910.1
(SEQ ID NO: 240)
MKAAARERKPRHSNGRAAAAAAKNLSKVEPGRHLAVVRLFPACLLALLICLCVVKFFSSLSSQSQRIGTRSRMVSSW
EGSASTNVPRIPVAPLIMGRVDEDISTRSPELGVVIVFVLAVSRVVTFLVETCKGLGFCHWKPLSYPMLILKGKQGS
VFKNENFKNGTDSENKSRSERQVAISTENDPPPGKEESLTKSPQTAVSESEVPKPKSKISCDDKSKDEGFPYARPIV
CHLSGDVRVSPATSSVTLTMPLQQGEAAARRIRPYARRDDFLLPLVREVAITSAASEGDAPSCNVSHGVPAVIFSIG
GYTGNFFHDMADVLVPLYLTTFHFKGKVQLFVANYKQWWIQKYKPVLRRLSHRAVVDFDSDGDVHCFDHVIVGLVRD
RDLILGQHPTRNPKGYTMVDFTRFLRHAYGLRRDKPMVLGETSGKKPRMLIISRRRTRKLLNLRQVAAMARELGFEV
VVSEAGVGGGSGGVKRFASAVNSCDVLVGVHGAGLTNQAFLPRGGVVVQIVPWGRMEWMATNFYGAPAAAMELRYVE
YHVAAEESSLARRYPREHAVFRDPMAIHGQGWKALADIVMTQDVKLNLRRFRPTLLRVLDLLQD
>LOC_Os01g02920.1
(SEQ ID NO: 241)
MGGDHGKLMKSLKGAAQKYLGVGFLLGFFLVLLTYFTVSEQFAIAAPNAIRKTSPGHASPTIPPPVEEKRPQLPPII
EQRQAPKAEHEHAAVVQEKTPSAEEIEIQKETEEDHTKEKPTDDVTTTVEESAPAKKPACDIQGPWASDVCSIDGDV
RIHGAAHDVVIPPPIEGGGSNPNPREWRVVPYSRKHMGGLKEVAVREVASAAEAPACDVRSPVPALVFAMGGLTGNY
WHDFSDVLIPLYLQARRFDGEVQLVVENIQMWYVGKYKRVLDRLSRHDIVDMDRDDKVRCFPGAVVGIRMHKEFSID
PARDPTGHSMPEFTKFLRDTFSLPRDAPVSLVDNAAAVRPRLMIISRRHPRKLMNVEEVVRAAERIGFEVVIGDPPF
NVDVGEFAKEVNRADVLMGVHGAGLTNSVFLPTGAVLIQVVPYGKMEHIGKVDFGDPAEDMRLKYMAYSAGVEESTL
VETLGRDHPAVRDPESVHRSGWGKVAEYYLGKQDIRLDLARFEPLLRDAMDYLKHQ
>LOC_Os01g02930.1
(SEQ ID NO: 242)
MGSEVKPAKLGLRRHLNAGFFAGFLLVLLTYVIVSQQFAMETPTAVTSRAPRIDENESVTKARVE
TEKKREQEWQRPKDTSGAVSAEEFSKRDSTNAKPIENGKVVCGSNGFYSDTCDVDGDVRINGTALSVTLVPASRRSE
RRREWKIQPYPRRTVSGIAEVTVTRQQDRAAAPACTVTHGVPGVVFALGGLTGNYWHDFSDVLVPLFVASRRYGGEV
QFLVSNIQPWWLGKYEAVVRRLSRYDAVDLDRDTEVRCFRRVAVGLRMHKEFSVKPELAPGGQRLTMADFAAFLRDT
YALPRAAAAGARRPRLVVIRRAHYRKIVNMDEVVRAAEAAGFEAAVMSPRFDEPVEEVARKVNAFDAMVGVHGAGLT
NAVFLPAGAVVIQVVPYGRLERMARADFGEPVADMGLRYMEYSVAADESTLLEMLGPEHQVVKDPEAVHRSGWDKVA
EYYLGKQDVRINVARFAATLAAAFDHLRPSHS
>LOC_Os01g02940.1
(SEQ ID NO: 243)
MEGGGKAGYSYGGHHHHQDAKLLKNLSRVEPRRFGLGLVAGFLIVTCAYFSTAKFDAIHIAMISSPAKNAAGFMNAS
SDGSNQQQLDLDRDAMSREGSKAQVLDTDGDDKISSLGPDLGHNASALEGKKKDETFAKDSGDASVSASTDEALAKD
DDAIVGAVLPPLSSEEPTNITQDSVLEDEELKVQETAPATTNPSPEKSSNNGSSPSVVPSDPATLPVQQIPPTQEAK
DPPAQQIPAVPEAKVPPVQQIPTFPVVKTDSEAAPRRKEWKPLCDLWSNRRIDWCELDGDVRVAGANGTVSLVAPPG
PADERTFRAESWHIKPYPRKADPNAMRHVRVLTVQSLPAPAASAAAPACTERHDVPGLVFSDRGYTGNYFHAYTDVI
LPLFLTARQYSGEVKLLVSDFQMWWLGKFLPVFKAVSNYDLINLDDDRRVHCFRHVQVGLTCHADFSIDPSRAPNGY
SMVDFTRFMRATYRLPRDAPFPASGEQQPRRPWRPRLLVIARARTRRFVNADEIVRGAERAGFEVVVSEGEHEVAPF
AELANTCDAMVGVHGAGLTNMVFLPTGGVVIQVVPLGGLEFVAGYFRGPSRDMGLRYLEYRITPEESTLIDQYPRDH
PIFTDPDGVKSKGWNSLKEAYLDKQDVRLDMKRFRPILKKAIAHLRKNSGNNNTTHN
>LOC_Os01g02940.2
(SEQ ID NO: 244)
MEGGGKAGYSYGGHHHHQDAKLLKNLSRVEPRRFGLGLVAGFLIVTCAYFSTAKFDAIHIAMISSPAKNAAGFMNAS
SDGSNQQQLDLDRDAMSREGSKAQVLDTDGDDKISSLGPDLGHNASALEGKKKDETFAKDSGDASVSASTDEALAKD
DDAIVGAVLPPLSSEEPTNITQDSVLEDEELKVQETAPATTNPSPEKSSNNGSSPSVVPSDPATLPVQQIPPTQEAK
DPPAQQIPAVPEAKVPPVQQIPTFPVVKTDSEAAPRRKEWKPLCDLWSNRRIDWCELDGDVRVAGANGTVSLVAPPG
PADERTFRAESWHIKPYPRKADPNAMRHVRVLTVQSLPAPAASAAAPACTERHDVPGLVFSDRGYTGNYFHAYTDVI
LPLFLTARQYSGEVKLLVSDFQMWWLGKFLPVFKAVSNYDLINLDDDRRVHCFRHVQVGLTCHADFSIDPSRAPNGY
SMVDFTRFMRATYRLPRDAPFPASGEQQPRRPWRPRLLVIARARTRRFVNADEIVRGAERAGFEVVVSEGEHEVAPF
AELANTCDAMVGVHGAGLTNMVFLPTGGVVIQVVPLGGLEFVAGYFRGPSRDMGLRYLEYRITPEESTLIDQYPRDH
PIFTDPDGVKSKGWNSLKEAYLDKQDVRLDMKRFRPILKKAIAHLRKNSGNNNTTHN
>LOC_Os01g02940.3
(SEQ ID NO: 245)
MEGGGKAGYSYGGHHHHQDAKLLKNLSRVEPRRFGLGLVAGFLIVTCAYFSTAKFDAIHIAMISSPAKNAAGFMNAS
SDGSNQQQLDLDRDAMSREGSKAQVLDTDGDDKISSLGPDLGHNASALEGKKKDETFAKDSGDASVSASTDEALAKD
DDAIVGAVLPPLSSEEPTNITQDSVLEDEELKVQETAPATTNPSPEKSSNNGSSPSVVPSDPATLPVQQIPPTQEAK
DPPAQQIPAVPEAKVPPVQQIPTFPVVKTDSEAAPRRKEWKPLCDLWSNRRIDWCELDGDVRVAGANGTVSLVAPPG
PADERTFRAESWHIKPYPRKADPNAMRHVRVLTVQSLPAPAASAAAPACTERHDVPGLVFSDRGYTGNYFHAYTDVI
LPLFLTARQYSGEVKLLVSDFQMWWLGKFLPVFKAVSNYDLINLDDDRRVHCFRHVQVGLTCHADFSIDPSRAPNGY
SMVDFTRFMRATYRLPRDAPFPASGEQQPRRPWRPRLLVIARARTRRFVNADEIVRGAERAGFEVVVSEGEHEVAPF
AELANTCDAMVGVHGAGLTNMVFLPTGGVVIQVVPLGGLEFVAGYFRGPSRDMGLRYLEYRITPEESTLIDQYPRDH
PIFTDPDGVKSKGWNSLKEAYLDKQDVRLDMKRFRPILKKAIAHLRKNSGNNNTTHN
>LOC_Os01g02940.4
(SEQ ID NO: 246)
MEGGGKAGYSYGGHHHHQDAKLLKNLSRVEPRRFGLGLVAGFLIVTCAYFSTAKFDAIHIAMISSPAKNAAGFMNAS
SDGSNQQQLDLDRDAMSREGSKAQVLDTDGDDKISSLGPDLGHNASALEGKKKDETFAKDSGDASVSASTDEALAKD
DDAIVGAVLPPLSSEEPTNITQDSVLEDEELKVQETAPATTNPSPEKSSNNGSSPSVVPSDPATLPVQQIPPTQEAK
DPPAQQIPAVPEAKVPPVQQIPTFPVVKTDSEAAPRRKEWKPLCDLWSNRRIDWCELDGDVRVAGANGTVSLVAPPG
PADERTFRAESWHIKPYPRKADPNAMRHVRVLTVQSLPAPAASAAAPACTERHDVPGLVFSDRGYTGNYFHAYTDVI
LPLFLTARQYSGEVKLLVSDFQMWWLGKFLPVFKAVSNYDLINLDDDRRVHCFRHVQVGLTCHADFSIDPSRAPNGY
SMVDFTRFMRATYRLPRDAPFPASGEQQPRRPWRPRLLVIARARTRRFVNADEIVRGAERAGFEVVVSEGEHEVAPF
AELANTCDAMVGVHGAGLTNMVFLPTGGVVIQVVPLGGLEFVAGYFRGPSRDMGLRYLEYRITPEESTLIDQYPRDH
PIFTDPDGVKSKGWNSLKEAYLDKQDVRLDMKRFRPILKKAIAHLRKNSGNNNTTHN
>LOC_Os01g02940.5
(SEQ ID NO: 247)
MEGGGKAGYSYGGHHHHQDAKLLKNLSRVEPRRFGLGLVAGFLIVTCAYFSTAKFDAIHIAMISSPAKNAAGFMNAS
SDGSNQQQLDLDRDAMSREGSKAQVLDTDGDDKISSLGPDLGHNASALEGKKKDETFAKDSGDASVSASTDEALAKD
DDAIVGAVLPPLSSEEPTNITQDSVLEDEELKVQETAPATTNPSPEKSSNNGSSPSVVPSDPATLPVQQIPPTQEAK
DPPAQQIPAVPEAKVPPVQQIPTFPVVKTEAAPRRKEWKPLCDLWSNRRIDWCELDGDVRVAGANGTVSLVAPPGPA
DERTFRAESWHIKPYPRKADPNAMRHVRVLTVQSLPAPAASAAAPACTERHDVPGLVFSDRGYTGNYFHAYTDVILP
LFLTARQYSGEVKLLVSDFQMWWLGKFLPVFKAVSNYDLINLDDDRRVHCFRHVQVGLTCHADFSIDPSRAPNGYSM
VDFTRFMRATYRLPRDAPFPASGEQQPRRPWRPRLLVIARARTRRFVNADEIVRGAERAGFEVVVSEGEHEVAPFAE
LANTCDAMVGVHGAGLTNMVFLPTGGVVIQVVPLGGLEFVAGYFRGPSRDMGLRYLEYRITPEESTLIDQYPRDHPI
FTDPDGVKSKGWNSLKEAYLDKQDVRLDMKRFRPILKKAIAHLRKNSGNNNTTHN
>LOC_Os01g02940.6
(SEQ ID NO: 248)
MEGGGKAGYSYGGHHHHQDAKLLKNLSRVEPRRFGLGLVAGFLIVTCAYFSTAKFDAIHIAMISSPAKNAAGFMNAS
SDGSNQQQLDLDRDAMSREGSKAQVLDTDGDDKISSLGPDLGHNASALEGKKKDETFAKDSGDASVSASTDEALAKD
DDAIVGAVLPPLSSEEPTNITQDSVLEDEELKVQETAPATTNPSPEKSSNNGSSPSVVPSDPATLPVQQIPPTQEAK
DPPAQQIPAVPEAKVPPVQQIPTFPVVKTEAAPRRKEWKPLCDLWSNRRIDWCELDGDVRVAGANGTVSLVAPPGPA
DERTFRAESWHIKPYPRKADPNAMRHVRVLTVQSLPAPAASAAAPACTERHDVPGLVFSDRGYTGNYFHAYTDVILP
LFLTARQYSGEVKLLVSDFQMWWLGKFLPVFKAVSNYDLINLDDDRRVHCFRHVQVGLTCHADFSIDPSRAPNGYSM
VDFTRFMRATYRLPRDAPFPASGEQQPRRPWRPRLLVIARARTRRFVNADEIVRGAERAGFEVVVSEGEHEVAPFAE
LANTCDAMVGVHGAGLTNMVFLPTGGVVIQVVPLGGLEFVAGYFRGPSRDMGLRYLEYRITPEESTLIDQYPRDHPI
FTDPDGVKSKGWNSLKEAYLDKQDVRLDMKRFRPILKKAIAHLRKNSGNNNTTHN
>LOC_Os02g22190.1
(SEQ ID NO: 249)
MGSPKMAKSAMKQGIWRRRIGAPFAAVLVAAVLAVVVFSGQFAKGPNASSQFAPVQVDNTLRPTRDKPVSADQDLER
TVSSKLEGEDTEQIRLEDGQSPNKEAAIEEQKPSQAAAIDQDDNTLNPGLKQASGDERSAGGSDSLSKESPPQSQEG
DGGTAESGAEPYIKCTAQSDIKICDLSNPRFDICELCGDARTIGQSSTVVYVPQNRASNGEEWIIRAQSRKHLPWIK
KVTIKSVNSSEPEPICTSKHHIPAIVFALGGLTANVWHDFSDVLVPLFLTARQFNRDVQLIITNNQPWFIKKYSAIF
SRLTRHEIIDFDSDGQIRCYPHVIVGLRSHRDLGIDPSSSPQNYTMVDFRLFVREAYGLPAAEVDIPYKADKDDPDK
KPRIMLIDRGKSRRFVNVAHVVQGLDWFGFEVVKADPKIDSNLDEFVRLVDSCDAIMGVHGAGLTNMVFLRSGGVVV
HIVPYGIKFMADGFYGAPARDMGLRHVEYSISPEESTLLEKYGWNHTVINDPETIRKGGWEKVAEFYMSKQDIVLNM
TRFGPSLLNAIEFIM
>LOC_Os04g12010.1
(SEQ ID NO: 250)
MRRGESKAATRGANRSSSSSSWKSRYIGYGLVLGFVLVLLYLMVNAQFSNSPNAYLGPATTSKTESIPATTYQGNQA
WQEDGSRGLEEGHREEVASTHTERSTGQRQEKDDESEKQRTEKNSIEEQLGNDRSSNYWEEGRQSEKKDTIEFSEFG
GGTDDFNNVANTKPICDTSFGKYDICVLDGDTRAQGGGGAGAAVVTLVSPRAAPREWKIKPYSRKYLDGLKPVTVRS
VPNPEDAPPCTTRLNVPAMVIELGGLTGNYWHDFTDVLVPLFIGARRFGGEVQLLVVNLLPFWVDKYRRIFSQISRH
DIVDLEKDDDRGVVRCYPHVVVGYGSRKEFTIDPSLDDTGGGYTMVNFTEFLRQSYSLPRDRPIKLGTNHGARPRMM
ILERTNSRKLMNLPEVAAAARAAGFEVTVAGGRPTSTYDEFAREVNSYDVMVGVHGAGLTNCVFLPTGAVLLQIVPY
GRLESIAQTDFGEPARDMGLRYIEYDIAADESSLMDVFGKDHPMIKDPVAVHLSGWGNVAEWYLGKQDVRVNIERFR
PFLTQALEHLQ
>LOC_Os04g12010.2
(SEQ ID NO: 251)
MRRGESKAATRGANRSSSSSSWKSRYIGYGLVLGFVLVLLYLMVNAQFSNSPNAYLGPATTSKTESIPATTYQGNQA
WQDGSRGLEEGHREEVASTHTERSTGQRQEKDDESEKQRTEKNSIEEQLGNDRSSNYWEEGRQSEKKDTIEFSEFGG
GTDDFNNVANTKPICDTSFGKYDICVLDGDTRAQGGGGAGAAVVTLVSPRAAPREWKIKPYSRKYLDGLKPVTVRSV
PNPEDAPPCTTRLNVPAMVIELGGLTGNYWHDFTDVLVPLFIGARRFGGEVQLLVVNLLPFWVDKYRRIFSQISRHD
IVDLEKDDDRGVVRCYPHVVVGYGSRKEFTIDPSLDDTGGGYTMVNFTEFLRQSYSLPRDRPIKLGTNHGARPRMMI
LERTNSRKLMNLPEVAAAARAAGFEVTVAGGRPTSTYDEFAREVNSYDVMVGVHGAGLTNCVFLPTGAVLLQIVPYG
RLESIAQTDFGEPARDMGLRYIEYDIAADESSLMDVFGKDHPMIKDPVAVHLSGWGNVAEWYLGKQDVRVNIERFRP
FLTQALEHLQ
>LOC_Os06g13710.1
(SEQ ID NO: 252)
MKAAVGNKKSKGTFCAFCHPSLLLLIVAIQFLMIYSPTLDQYMVMLTTDEFIPEPHLRCDFSDNKSDVYEMEGAIRI
LSRELEVFLVAPRLASISGRSGVNTTGLDANATRWKIQPYTHKGESRVMPSITEVTLRLVTVDEAPPCDEWHDVPVI
VYSNGGYCSN
>LOC_Os06g20570.1
(SEQ ID NO: 253)
MKGRHERIKKGWSGSAAVWLLLVPLFVLIVLKTDFLPQVARLGDTSFTKVADEMVQKVSSLGLDRARWQQQQTLDVA
KLEDSVVGTSDELTGHVDANNEDSNQPNQQILAMSRSKDSRLINSDVAAAKTSHLSCNFSSAHMDTCAMDGDIRIHG
RSGVVYVVASSDYRPENATAVIRPYPRKWEQATMERVRQITIRSTAPPGAAVADTDGGGAIIPLRCTVARDMPAVVF
STGGYSVNFFHTMNDILLPLYITAREHGGRVQLLAANYDRRWTAKYQHALAALSMYPVVDLDADAAVRCFPSARVGV
ESHRVLGIDTPLTGSNGYTMVGFLAFLRSAYSLPRHAVTRTTPRRPRVVMVLRRKSRALTNEAEVVAAVAEAGFEVV
AAGPEEAGDVAGFAATVNSCDVMVGVHGAGLTNMVFLPRNGTVVQIIPWGGMKWPCWYDYGEPVPAMGLRYVEYEVA
ANETTLRERYPMDHPVFADPVSIHRKGFNHLWSTFLNGQNLTLDVNRFKAVMAEVYTSITAAPV
>LOC_Os06g49300.1
(SEQ ID NO: 254)
MKAAVRSKKSKGSFCHPPLLLLIVAIQFLVIYSPTLDQYMVMLTTGKPGFPSMLIDGRRSFKQVDEFIPEPHLRCDF
RDNRSDVCEMEGAIRILGRTSEVFLVAPSLASISGGGGGVNATGVDANATRWKIQPYTRKGESRVMPGITEVTVRLV
TADEAPPCDEWHDVPAIVYSNGGYCGNYYHDFNDNIIPLFITSRHLAGEVQLLVTQKQRWWFGKYREIVEGLTKYEP
VDLDAEQRVRCYRRATVGLHSHKDLSIDPRRAPNNYSMVDFKRFLMWRYALPREHAIRMEEEDKSKKPRLLVINRRS
RRRFVNLDEIVAAAEGVGFEVAAAELDAHIPAAASAVNSYDAMVAVHGSGLTNLVFLPMNAVVIQVVPLGRMEGLAM
DEYGVPPRDMNMRYLQYNITAEESTLSEVYPRAHPVFLDPLPIHKQSWSLVKDIYLGQQDVRLDVRRFRPVLLKALH
LLR
>LOC_Os08g34680.1
(SEQ ID NO: 255)
MEGAIRILGRELEVFLVAPRLASISGRSGVNTTGLDANATRWKIQPYTHKGESRVMPAITEVTLRLVTVDEAPPCDE
WHDVPVIVYSNGGYCSN
>LOC_Os11g36700.1
(SEQ ID NO: 256)
MRAALAVLVARRRHHLLRPLEFQHRRLLHGQRRADGPVVPVAPAVPQAAADGERHRGGEDTSVHAQVGGAHHEQGRG
GAAPDGSSRHDAPLLVMTAGGYTGNLFHAFSDGFVPAWLTVQHLRRRVVLGVLLYNPWWAGTYGEIISGLLDYHVVD
LLHDKRKHCFPGAIIGTRFHGILSVNPARLRDNKTIVDFHDLLADVYETAGDTVVVDVPQPAPRRPRLGIVSCRGKR
VIENQAAVARLARTVGFDVDILETADGLQLPASYASVSACDVLVGVHSADLTKLLFLRPGAALV
>LOC_Os03g48010.1
(SEQ ID NO: 257)
MASSPRPAATAAAHRRGLIQRPPSAQAYLSAAAALLVLAAVAFSRAGHRFPHPPATRRCRPDAEGSWSAGVFLGDSP
FSLEPIEHWGISKADGAAWPVANPVVTCAEVEDAGFPSSFVAKPFLFLQGDAIYMFFETKNPITSQGDIAAAVSEDA
GVTWQQLGVVLDEEWHLSYPYVFTYKNKVYMMPESSKNGDIRLYRALDFPLKWELEKVLLEKPLVDSVIINFQGSYW
LLGTDLSSYGAKRNREISIWYSNSPLSPWIPHKQNLIHNTGKMLSTRNGGRPFIYNGNLYRVGKGQGGGSGHGIQVF
KVEILKSNEYKEVEVPFVINKQLKGRNAWNGARSHHLDVQQLPSGKPWIGVMDGDRVPSGDSVHRLTIGYMIYGVVL
ILVLVTGGLIGTINCSLPLRWSLPHTEKRSGLFNVEQRFFLYHKLSSLISNLNKLGSLICGRINYRTCKGRVYVVVV
MLILVVLTCVGTHYIYGGNGAEEPYPIKGKYSQFTLLTMTYDARLWNLKMFVEHYSNCASVRDIVVVWNKGQPPAQG
ELKSVVPVRIRVEDRNSLNNRFNIDSEIKTKAVMELDDDIMMTCDDLERGFKVWREHPDRIIGYYPRLSEGSPLEYR
NERYARQQGGYNMVLTGAAFMDHGLAFKKYWSKEAEVGRQIVDSFFNCEDILLNFLFANASLTSTVEYVKPAWAIDM
SKFSGVAISRNTQAHYHVRSKCLAKFSEIYGNLTAKRFFNSRGDGWDV
>LOC_Os05g44360.2
(SEQ ID NO: 258)
MAAAILAMVPSYISRSVAGSYDNEAVAIFALIFTFYLYVKTLNTGSLFYATLNALSYFYMVCSWGGYTFIINLIPIH
VLLCIVTGRYSSRLYIAYAPLVILGTLLAALVPVVGFNAVMTSEHFASFLVFIILHVVALVYYIKGLLTPRLFKVAM
TLVITVGLAVCFAVIAILIALVASSPTKGWSGRSLSLLDPTYASKYIPIIASVSEHQPPTWPSYFMDINVLAFLIPA
GIISCFLPLSDASSFVVLYLVTAVYFSGVMVRLMLVLAPAACILSGIALSEAFDVLTRSVKYQLSKLFDDSPAASGD
SSAESSSASTVSTNSAKNETRPEKTETAPKEKPSKKNRKKEKEVAESVPVKPKKEKKLLVLPMEASVLGILLLIVLG
GFYVVHCVWAAAEAYSAPSIVLTSRSRDGLHVFDDFREAYAWLSHNTDVDDKVASWWDYGYQTTAMANRTVIVDNNT
WNNTHIATVGTAMSSPEKAAWEIFNSLDVKYVLVVFGGLVGYPSDDINKFLWMVRIGGGVFPHIKEPDYLRDGNYRV
DAQGTPTMLNCLMYKLCYYRFDKQNSIDNV
>LOC_Os01g69140.1
(SEQ ID NO: 259)
MMMGGQQSALNQLVSFLLGVSAAAVLIFFFSSAGGGWSTTTDLSSWANGTVAATAKETNLTSTAAHVEEKANLTNSQ
AAAAEAAKEEEEKELEKLLAAVADEHKNIIMTSVNEAWAAPGSLLDLFLEGFRAGEGIARFVDHLLIVALDDGAFRR
CRDVHPHCYRLAVAGRNFTDEKVFMSEDYLDLVWSKVKLQQRILELGYNFLFTDVDILWFRDPFEQMSMAAHMVTSS
DFFVGGAYNPANFPNTGFLYVRSSRRAVGVMEAWRAARASYPGRHEQQVLNEIKRELVERRGVRIQFLDTAHVAGFC
SNTRDFATLYTMHANCCVGLGAKLHDLRNLLEEWRAYRRMPDEQRRQGPVRWKVPGICIH
>LOC_Os01g69160.1
(SEQ ID NO: 260)
MEIKGNLRRFFVFLFELWLAATLVLVLLCVLANTGGSPEMPAAAEVCNCSQIGIASSRISEEVTGTSGNSNESSFAD
LAELLPKVATDDRTVIITSVNEAFARPNSLLVLFRESFAAGEKIAHLLDHVLVVAVDPAAFHHCRAVHPHCYHLKVD
TMNLSSANNFMSEAYVELVWTKLSLQQRVLELGYNFLFTDVDILWFRDPFRHIGVYADMTTSCDVFNGDGDDLSNWP
NTGFYHVKSTNRTVEMLRRWRAARARYPPNHEQNIFNYIKHELAAGLGVRVRFLDTAVFGGFCQLFRNDMARACTMH
ANCCVGLGNKLHDLRSALDQWANYTSPAPPEGRKKKSGGGGGDRRAGWSVPAKCGTPDKRG
>LOC_Os01g69174.1
(SEQ ID NO: 261)
MYFPPGLLALGNMSGHYYHHLTSFLLGAVLPTVLLFFLASDRVSERLPTISSLGNGALVIGGRATAREGGDLTGVDG
SAPAPAEKEKFPGLAELLPEVAMEDKTVIITSVNDAWAAPGSLLDLFRDSFHNGDGIAHLLDHVLVVAVDAGGFRRC
KAVHPHCYLLDVPGHGGLRRLLRVPPRRRQGVHGARQLLRRAGEQGARPQERARRLEELHGRPDVAGEEGCQQVQVD
VPGQVQGVVETALTMKSGNGQRLIILYIG
>LOC_Os01g69190.1
(SEQ ID NO: 262)
MGLGLGGGGGMAMINRNHVVSFLAGAALPTLLLFFLASDRVSEKLAIVSSWGSGGSSSAAAADHDLRGAGGDAAPPP
AQQEKFPGLPELLPKVAMEDRTVIITSVNEAWAAPGSLLDLYRDSFKNGEGIAHLLDHVLVVAVDPAGFRRCKAVHP
HCYLLHVKSINLTSATRFMSREYLELVWTKLSLQQRVLELGYNFLFTDCDMVLFRDPFRHIAVYADMSTSSDDYSAA
RAPLDNPLNTGLYYVKATSQSVEMLRYWQAARPRFPGAHDQAVFGHIKHELVAKLRARIEPLDTLYFGGFCEYHDDL
ARAVTMHADCCVGLDTKVHDLTDIAADWKNYTGMSPEERKKGGFKWTYPTRCRNSIGWRKPVHP
>LOC_Os01g69200.1
(SEQ ID NO: 263)
MRGSAGMASSKNGLSPVVVFLLGAASATALIVFVFTSTASPAWPTPEATPATRQEKKAAAVACAPRAKGIDSETRRA
ARTNQTGGGDDDDEFARMVRRAAMEDRTVIMTSVNEAWAAPGSLMDSFLESFRVGENISHFVEHIVVVAMDEGALRR
CRAIHPHCYLLLPEVAGLDLSGAKSYMTKDYLDLVWSKLKLQQRASMIVGETRGVDDEEHDARWHWQDVDLAWFRNP
MVHITAAADITTSSDFYFGDPDDLGNYPNTGFIYFKATPRNARAMAYWHAARRRFPGEHDQFVFNEIKRELAAGAGE
GGGVGVRIRFIDTAAVSGFCQLGRDLNRIATVHMTCCIGLENKLHDLRNVIRDWRRYVARPRWERQMGKIGWTFEGG
KCIH
>LOC_Os03g03730.1
(SEQ ID NO: 264)
MANGTVILTTLNSAWAEPGSVVDVFLESFRIGDETRWLLDHLVMVSLDLTAHRRCLQIHRHCFALTTDDGFDFSGEK
NFMTDGYLKMMWRRIDFLGHVLAKGYSFIFTDTDIVWFRNPLPHLHHDGDFQIACDHFTGDPDDLSNSPNGGFAYVR
STSATAAFYRYWYAARERHPGLHDQDVLNLIKRDAYVARLGVRIRFLSTDLFAGLCEHGRNLSTVCTMHANCCVGLR
RKVDDLGLMLQDWRRFMATPGSDRHSVTWSVPRNCR
>LOC_Os03g63280.1
(SEQ ID NO: 265)
MAPKVAVTEATGRQAASFVLGCVATLTVMLLFQYQAPPDYGRAARSPVQFSTSRDQLLLHCGGNGTAPPPPVIARGG
EEANITGKPPTTATAVAEEQPPTKPPATSTASSPTHHIPATSTDLEEEGGEFRGLAAAVARAATDDRTVIITCVNHA
FAAPDSLLDIFLQGFRVGDGTPELLRHVLVVAMDPTALTRCRAVHPHCYLYTMPGLDVDFTSEKFFASKDYLELVWS
KLKLQRRILQLGYNFLFTDVDIVWLRNPFKHVAVYADMAISSDVFFGDPDNIDNFPNTGFFYVKPSARTIAMTKEWH
EARSSHPGLNEQPVFNHIKKKLVKKLKLKVQYLDTAYIGGFCSYGKDLSKICTMHANCCIGLQSKISDLKGVLADWK
NYTRLPPWAKPNARWTVPGKCIH
>LOC_Os08g41800.1
(SEQ ID NO: 266)
MACKVRGDMGKLIPVISFFLGAALTAAFVIATMDINWRLSALASWNNNDSPPAVTDEMKALSELTEVLRNASMDDRT
VIMTSINRAYAAPGSLLDLFLESFRLGEGTEPLLKHVLIVAMDPAALARCRQVHPHCYLLRRPEGAVDYSDEKRFMS
KDYLDMMWGRNLFQQTILQLGFNFLFTDIDIMWFRNPLRHIAITSDIAVANDYYNGDPESLRNRPNGGFLYVRAARR
TVDFYRRWRDARRRFPPGTNEQHVLERAQAELSRRADVRMQFLDTAHCGGFCQLSRDMARVCTLHANCCTGLANKVH
DLAAVLRDWRNYTAAPPAARRRGGFGWTTPGKCIR
Os01g70200.1
(SEQ ID NO: 267)

MRRWVLAIAILAAAVCFFLGAQAQEVRQGHQTERISGSAGDVLEDDPVGRLKVYVYDLPSKYNKKLLKKDPRCLNHM
FAAEIFMHRFLLSSAVRTFNPEEADWFYTPVYTTCDLTPSGLPLPFKSPRMMRSAIELIATNWPYWNRSEGADHFFV
TPHDFGACFHYQEEKAIGRGILPLLQRATLVQTFGQKNHVCLKDGSITIPPYAPPQKMQAHLIPPDTPRSIFVYFRG
LFYDTSNDPEGGYYARGARASVWENFKNNPLFDISTDHPPTYYEDMQRSVFCLCPLGWAPWSPRLVEAVVFGCIPVI
IADDIVLPFADAIPWEEIGVFVAEEDVPKLDSILTSIPTDVILRKQRLLANPSMKQAMLFPQPAQAGDAFHQILNGL
ARKLPHGENVFLKPGERALNWTAGPVGDLKPW

Os06g23420.1
(SEQ ID NO: 268)
MRRWVLAIAILAAAVCFFLGAQAQEVRQGHQTERISGSAGDVLEDDPVGRLKVYVYDLPSKYNKKLLKKDPRCLNHM
FAAEIFMHRFLLSSAVRTFNPEEADWFYTPVYTTCDLTPSGLPLPFKSPRMMRSAIELIATNWPYWNRSEGADHFFV
TPHDFGACFHYQEEKAIGRGILPLLQRATLVQTFGQKNHVCLKDGSITIPPYAPPQKMQAHLIPPDTPRSIFVYFRG
LFYDTSNDPEGGYYARGARASVWENFKNNPLFDISTDHPPTYYEDMQRSVFCLCPLGWAPWSPRLVEAVVFGCIPVI
IADDIVLPFADAIPWEEIGVFVAEEDVPKLDSILTSIPTDVILRKQRLLANPSMKQAMLFPQPAQAGDAFHQILNGL
ARKLPHGENVFLKPGERALNWTAGPVGDLKPW
Os06g23420.2
(SEQ ID NO: 269)
MRRWVLAIAILAAAVCFFLGAQAQEVRQGHQTERISGSAGDVLEDDPVGRLKVYVYDLPSKYNKKLLKKDPRCLNHM
FAAEIFMHRFLLSSAVRTFNPEEADWFYTPVYTTCDLTPSGLPLPFKSPRMMRSAIELIATNWPYWNRSEGADHFFV
TPHDFGACFHYQEEKAIGRGILPLLQRATLVQTFGQKNHVCLKDGSITIPPYAPPQKMQAHLIPPDTPRSIFVYFRG
LFYDTSNDPEGGYYARGARASVWENFKNNPLFDISTDHPPTYYEDMQRSVFCLCPLGWAPWSPRLVEAVVFGCIPVI
IADDIVLPFADAIPWEEIGVFVAEEDVPKLDSILTSIPTDVILRKQRLLANPSMKQAMLFPQPAQAGDAFHQILNGL
ARKLPHGENVFLKPGERALNWTAGPVGDLKPW

[0049] In some embodiments, the rice-diverged GT is naturally occurring or not naturally occurring, and comprises a GT enzymatic activity and an amino acid sequence that comprises an equal to or more than 70% sequence similarity with an amino acid sequence chosen from the group consisting of SEQ ID NOs:1-269 or SEQ ID NOs: 1-30. In some embodiments, the rice-diverged GT comprises an amino acid sequence that comprises an equal to or more than 80% sequence similarity with an amino acid sequence chosen from the group consisting of SEQ ID NOs:1-269 or SEQ ID NOs: 1-30. In some embodiments, the rice-diverged GT comprises an amino acid sequence that comprises an equal to or more than 90% sequence similarity with an amino acid sequence chosen from the group consisting of SEQ ID NOs:1-269 or SEQ ID NOs: 1-30. In some embodiments, the rice-diverged GT comprises an amino acid sequence that comprises an equal to or more than 95% sequence similarity with an amino acid sequence chosen from the group consisting of SEQ ID NOs:1-269 or SEQ ID NOs: 1-30. In some embodiments, the rice-diverged GT comprises an amino acid sequence that comprises an equal to or more than 99% sequence similarity with an amino acid sequence chosen from the group consisting of SEQ ID NOs:1-269 or SEQ ID NOs: 1-30.

[0050] In some embodiments, where the expression of the GT is modified or altered, the expression of the GT is completely shut down, essentially shut down, or reduced as compared to the expression of the GT in the wild-type cell. The expression of the GT is modified or altered as compared to the expression of the GT in a wild-type cell, wherein the GT is negative to the wild-type cell. In some embodiments, where the expression of the GT is modified or altered, the expression of the GT is increased as compared to the wild-type GT. The increase can be at least twice, at least thrice, at least five times, at least ten times, or at least twenty times that of the expression of the GT in the wild-type cell. In some embodiments, the expression of the GT is increased due to the increased expression of the GT from a promoter, or the presence of a plurality of a nucleic acid encoding the GT, such as, having multiple copies of nucleic acid encoding the GT, or a combination thereof.

[0051] In some embodiments, where the enzymatic activity of the GT is modified or altered, the GT has a modified or altered amino acid sequence as compared to the wild-type GT such that the enzymatic activity of the GT is modified altered, or a combination of both. The modification or alteration can be an insertion, deletion, substitution, or a frame-shift mutation. In some embodiments, the enzymatic activity of the GT is decreased as compared to the wild-type GT. In some embodiments, the GT is knocked out or absent.

[0052] In some embodiments, the cell is a recombinant cell. The GT in the cell can be on or integrated into the cell genome or chromosome, and/or on a stably introduced replicon. In some embodiments, the replicon is capable of stable replication and/or transmission in the cell. Suitable replicons and vectors can include, for example, origins of replication, and/or markers. A marker gene can confer a selectable phenotype on a plant cell. For example, a marker can confer, biocide resistance, such as resistance to an antibiotic (e.g., kanamycin, G418, bleomycin, or hygromycin), or an herbicide (e.g., chlorosulfuron or phosphinothricin).

[0053] In some embodiments, the cell, seed, tissue, organ, plant part or plant is transgenic.

[0054] The enzymatic activity is an enzymatic activity of GT (EC 2.4.x.y) and/or the formation of a glycosidic bind through transfer of one or more sugars from an activated donor molecule to an acceptor molecule. The GT is a GT of a plant. In some embodiments, the GT is modified or altered in a plant, wherein the plant is a monocot or a dicot. In some embodiments, the monocot is a grass. In some embodiments the plant is a woody plant such as Eucalyptus, cottonwood, alder, Douglas fir, Hemlock, pine or spruce. In some embodiments, the plant is a leguminous plant, including, but not limited to, alfalfa, clover, lucerne, birdsfoot trefoil, Stylosanthes, Lotononis bainessii, and sainfoin. In some embodiments, the plant is a forage grass, including, but not limited to, bahiagrass, bermudagrass, dallisgrass, pangolagrass, big bluestem, indiangrass, switchgrass, smooth bromegrass, orchardgrass, timothy, Kentucky bluegrass or tall fescue.

[0055] The present invention also provides for a seed, plant tissue, organ, plant part or a whole plant comprising a cell of the present invention. In some embodiments, the plant part is a leaf, leaf stalk, stem, root, or a combination thereof. In some embodiments, the whole plant includes, but is not limited to, a germinating seed. In some embodiments, the whole plant is a mature plant.

[0056] The present invention also provides for a method of identifying or determining a rice-diverged GT of a plant or cell, comprising: the steps described herein in Example 1 of this present specification.

[0057] The present invention also provides for a method of constructing a cell of the present invention, comprising: modifying or altering the enzymatic activity of the GT. In some embodiments of the invention, the method further comprises identifying or determining the GT, wherein the identifying or determining comprises the steps described herein in Example 1 of this present specification.

[0058] In some embodiments of the invention, the method of constructing a cell of the present invention comprises modifying or altering the expression of the GT. In some embodiments of the invention, the method further comprises identifying or determining the rice-diverged GT, wherein the identifying or determining comprises the steps described herein in Example 1 of the present specification.

[0059] In some embodiments, modifying or altering the expression of the GT comprises increasing or decreasing the expression of the GT as compared to the expression of the GT in a wild-type cell.

[0060] In some embodiments, the GT is native to the cell. In other embodiments, the GT is heterologous to the cell. In some embodiments, the expression of the GT is increased via one or more of the following: increased copies of ORFs encoding the GT, increased transcription of an ORF encoding the GT, increased translation of a messenger RNA or transcript encoding the GT, and/or increased post-translational processing of the GT. In yet further embodiments, the cell comprises more than one rice-diverged GT, wherein a first rice-diverged GT is native or heterologous to the cell and a second rice-diverged GT is heterologous to the cell and is different from the first rice-diverged GT. Increased transcription can result from the ORF encoding the GT operably linked with a promoter with a higher expression when compared to the wild-type promoter, the addition of one or more activator or enhancing nucleotide sequences capable of increasing the transcription of the ORF encoding the GT, or the deletion or inactivation of one or more repressor sequences capable of decreasing or reducing the transcription of the ORF encoding the GT, or a combination thereof.

[0061] In some embodiments, the expression of the GT is decreased or reduced. In some embodiments, the expression of the GT is shut down or knocked out, including but not limited to the deletion of all or part of the ORF encoding the GT, or one or more promoter which initiated transcription of the ORF encoding the GT. In some embodiments, the expression of the GT is decreased or reduced via one or more of the following: decreased or reduced copies of ORFs encoding the GT, decreased or reduced transcription of an ORF encoding the GT, decreased or reduced translation of a messenger RNA or transcript encoding the GT, and/or decreased or reduced post-translational processing of the GT. Decreased or reduced transcription can result from the ORF encoding the GT operably linked with a promoter with a lower expression when compared to the wild-type promoter or knocking out the wild-type promoter, the deletion or inactivation of one or more activator or enhancing nucleotide sequences capable of increasing the transcription of the ORF encoding the GT, or the addition of one or more repressor sequences capable of decreasing or reducing the transcription of the ORF encoding the GT, or a combination thereof.

[0062] In some embodiments of the invention, the GT is located on the cell genome, chromosome, integrated into the chromosome, or located on a replicon, such as an expression vector or vector. In some embodiments the expression vector or vector are capable of stable maintenance and replication in the cell.

[0063] In some embodiments of the invention, the method of constructing a cell of the present invention comprises modifying or altering the amino acid of the GT such that the enzymatic activity of the GT is modified or altered. In some embodiments of the invention, the method further comprises identifying or determining the rice-diverged GT, wherein the identifying or determining comprises the steps described herein in Example 1 of this present specification.

[0064] The present invention also provides for a method of constructing a seed, plant tissue, plant part, or whole plant comprising a cell of the present invention, comprising: constructing a cell of the present invention. In some embodiments of the invention, the method further comprises identifying or determining the rice-diverged GT, wherein the identifying or determining comprises the steps described herein in Example 1 of this present specification.

[0065] In some embodiments of the invention, the seed, plant tissue, organ, plant part, or whole plant comprises modified or altered cellulose or cell wall, as compared to the corresponding wild-type seed, plant tissue, plant part, or whole plant, wherein the modified or altered cellulose is caused wholly or in part by the modified or altered enzymatic activity of the rice-diverged GT. In some embodiments of the invention, the cellulose is less structurally rigid, more prone to mechanical breakdown, more prone to breakdown or enzymatic digestion, or a combination thereof.

[0066] Recombinant vectors can be made using, for example, standard recombinant DNA techniques (see, e.g., Sambrook et al. (1989) Molecular Cloning: A Laboratory Manual, 2nd ed., Cold Spring Harbor Laboratory, Cold Spring Harbor, N.Y.)

[0067] Methods of genetically modifying or altering the cells and plants of the present invention are well-known to those of ordinary skill in the art. Plant cells or tissues can be transformed with expression constructs (heterologous nucleic acid constructs, e.g., plasmid DNA into which the gene of interest has been inserted) using a variety of standard techniques. Effective introduction of vectors in order to facilitate plant gene expression is an important aspect of the invention. In some embodiment, the vector sequences are stably integrated into the cell genome, so that the introduced constructs are passed onto successive plant generations. The skilled artisan will recognize that a wide variety of transformation techniques exist in the art, and new techniques are continually becoming available. Any technique that is suitable for the target host plant may be employed within the scope of the present invention. For example, the constructs can be introduced in a variety of forms including, but not limited to, as a strand of DNA, in a plasmid, or in an artificial chromosome. The introduction of the constructs into the target plant cells can be accomplished by a variety of techniques, including, but not limited to calcium-phosphate-DNA co-precipitation, electroporation, microinjection, Agrobacterium-mediated transformation, liposome-mediated transformation, protoplast fusion or microprojectile bombardment. The skilled artisan can refer to the literature for details and select suitable techniques for use in the methods of the present invention.

### REFERENCES CITED HEREIN

[0068] 1. Affymetrix. Affymetrix Microarray Suite User Guide. (2001): Affymetrix.
[0069] 2. Altschul S F, Gish W, Miller W, Myers E W, Lipman D J. Basic local alignment search tool. Journal of molecular biology (1990) 215:403-410.
[0070] 3. An S, et al. Generation and analysis of end sequence database for T-DNA tagging lines in rice. Plant physiology (2003) 133:2040-2047.
[0071] 4. Bourne Y, Henrissat B. Glycoside hydrolases and glycosyltransferases: families and functional modules. Current opinion in structural biology (2001) 11:593-600.
[0072] 5. Brenner S, et al. Gene expression analysis by massively parallel signature sequencing (MPSS) on microbead arrays. Nature biotechnology (2000) 18:630-634.
[0073] 6. Burton R A, et al. Cellulose synthase-like Cs1F genes mediate the synthesis of cell wall (1,3;1,4)-beta-D-glucans. Science (New York, N.Y. (2006) 311:1940-1942.
[0074] 7. Campbell J A, Davies G J, Bulone V, Henrissat B. A classification of nucleotide-diphospho-sugar glycosyltransferases based on amino acid sequence similarities. The Biochemical journal (1997) 326 (Pt 3):929-939.
[0075] 8. Carpita N C. Structure and Biogenesis of the Cell Walls of Grasses. Annual review of plant physiology and plant molecular biology (1996) 47:445-476.
[0076] 9. Carpita N C, et al. Cell wall architecture of the elongating maize coleoptile. Plant physiology (2001) 127:551-565.
[0077] 10. Chen F, Mackey A J, Vermunt J K, Roos D S. Assessing performance of orthology detection strategies applied to eukaryotic genomes. PLoS ONE (2007) 2:e383.
[0078] 11. Coutinho P M, Deleury E, Davies G J, Henrissat B. An evolving hierarchical family classification for glycosyltransferases. Journal of molecular biology (2003) 328:307-317.
[0079] 12. Dardick C, Chen J, Richter T, Ouyang S, Ronald P. The rice kinase database. A phylogenomic database for the rice kinome. Plant physiology (2007) 143:579-586.
[0080] 13. Devos K M, Gale M D. Genome relationships: the grass model in current research. The Plant cell (2000) 12:637-646.
[0081] 14. Drakakaki G, Zabotina 0, Delgado I, Robert S, Keegstra K, Raikhel N. Arabidopsis reversibly glycosylated polypeptides 1 and 2 are essential for pollen development. Plant physiology (2006) 142:1480-1492.
[0082] 15. Droc G, et al. OryGenesDB: a database for rice reverse genetics. Nucleic acids research (2006) 34:D736-740.
[0083] 16. Egelund J, et al. Molecular characterization of two Arabidopsis thaliana glycosyltransferase mutants, rra1 and rra2, which have a reduced residual arabinose content in a polymer tightly associated with the cellulosic wall residue. Plant molecular biology (2007) 64:439-451.
[0084] 17. Egelund J, et al. Arabidopsis thaliana RGXT1 and RGXT2 encode Golgi-localized (1,3)-alpha-D-xylosyltransferases involved in the synthesis of pectic rhamnogalacturonan-II. The Plant cell (2006) 18:2593-2607.
[0085] 18. Egelund J, Skjot M, Geshi N, Ulvskov P, Petersen B L. A complementary bioinformatics approach to identify potential plant cell wall glycosyltransferase-encoding genes. Plant physiology (2004) 136:2609-2620.
[0086] 19. Farrokhi N, et al. Plant cell wall biosynthesis: genetic, biochemical and functional genomics approaches to the identification of key genes. Plant biotechnology journal (2006) 4:145-167.
[0087] 20. Finn R D, et al. Pfam: clans, web tools and services. Nucleic acids research (2006) 34:D247-251.
[0088] 21. Geisler-Lee J, et al. Poplar carbohydrate-active enzymes. Gene identification and expression analyses. Plant physiology (2006) 140:946-962.
[0089] 22. Haas B J, et al. Improving the Arabidopsis genome annotation using maximal transcript alignment assemblies. Nucleic acids research (2003) 31:5654-5666.
[0090] 23. Hazen S P, Scott-Craig J S, Walton J D. Cellulose Synthase-Like Genes of Rice. Plant Physiol. (2002) 128:336-340.
[0091] 24. Henrissat B, Coutinho P M, Davies G J. A census of carbohydrate-active enzymes in the genome of Arabidopsis thaliana. Plant molecular biology (2001) 47:55-72.
[0092] 25. Hong Z, Zhang Z, Olson J M, Verma D P. A novel UDP-glucose transferase is part of the callose synthase complex and interacts with phragmoplastin at the forming cell plate. The Plant cell (2001) 13:769-779.
[0093] 26. Hu Y, Walker S. Remarkable structural similarities between diverse glycosyltransferases. Chemistry & biology (2002) 9:1287-1296.
[0094] 27. Igura M, et al. Structure-guided identification of a new catalytic motif of oligosaccharyltransferase. The EMBO journal (2008) 27:234-243.
[0095] 28. IRGSP. The map-based sequence of the rice genome. Nature (2005) 436:793-800.
[0096] 29. Jain M, et al. F-box proteins in rice. Genome-wide analysis, classification, temporal and spatial gene expression during panicle and seed development, and regulation by light and abiotic stress. Plant physiology (2007) 143:1467-1483.
[0097] 30. Jeong D H, et al. Generation of a flanking sequence-tag database for activation-tagging lines in japonica rice. Plant J (2006) 45:123-132.
[0098] 31. Jung K H, An G, Ronald P C. Towards a better bowl of rice: assigning function to tens of thousands of rice genes. Nature reviews (2008a) 9:91-101.
[0099] 32. Jung K, Phetsom J, Lee J W, Chris Dardick, Patrick Canlas, Peijian Cao, Xia-Xu, Young-Su Seo, Shu Ouyang, Kyungsook An, Yun-Ja Cho, Geun Cheol Lee, Yoosook Lee, Gynheung An, and Pamela C. Ronald. 2008. Identification and Functional Analysis of Light-Responsive Unique Genes and Paralogous Gene Family Members in Rice. PLoS Genetics, (2008b) 4(8): e1000164
[0100] 33. Kolesnik T, et al. Establishing an efficient Ac/Ds tagging system in rice: large-scale analysis of Ds flanking sequences. Plant J (2004) 37:301-314.
[0101] 34. Larkin M A, et al. Clustal W and Clustal X version 2.0. Bioinformatics (Oxford, England) (2007) 23:2947-2948.
[0102] 35. Lee C, O′Neill M A, Tsumuraya Y, Darvill A G, Ye Z H. The irregular xylem9 mutant is deficient in xylan xylosyltransferase activity. Plant & cell physiology (2007a) 48:1624-1634.
[0103] 36. Lee C, Zhong R, Richardson E A, Himmelsbach D S, McPhail B T, Ye Z H. The PARVUS gene is expressed in cells undergoing secondary wall thickening and is essential for glucuronoxylan biosynthesis. Plant & cell physiology (2007b) 48:1659-1672.
[0104] 37. Liepman A H, Nairn C J, Willats W G, Sorensen I, Roberts A W, Keegstra K. Functional genomic analysis supports conservation of function among cellulose synthase-like a gene family members and suggests diverse roles of mannans in plants. Plant physiology (2007) 143:1881-1893.
[0105] 38. Lin H, et al. Characterization of paralogous protein families in rice. BMC plant biology (2008) 8:18.
[0106] 39. Miki D, Itoh R, Shimamoto K. RNA silencing of single and multiple members in a gene family of rice. Plant physiology (2005) 138:1903-1913.
[0107] 40. Mitchell R A, Dupree P, Shewry P R. A novel bioinformatics approach identifies candidate genes for the synthesis and feruloylation of arabinoxylan. Plant physiology (2007) 144:43-53.
[0108] 41. Miyao A, et al. Target site specificity of the Tos17 retrotransposon shows a preference for insertion within genes and against insertion in retrotransposon-rich regions of the genome. The Plant cell (2003) 15:1771-1780.
[0109] 42. Mulder N J, et al. New developments in the InterPro database. Nucleic acids research (2007) 35:D224-228.
[0110] 43. O'Reilly M K, Zhang G, Imperiali B. In vitro evidence for the dual function of Alg2 and Alg11: essential mannosyltransferases in N-linked glycoprotein biosynthesis. Biochemistry (2006) 45:9593-9603.
[0111] 44. Ouyang S, et al. The TIGR Rice Genome Annotation Resource: improvements and new features. Nucleic acids research (2007) 35:D883-887.
[0112] 45. Pauly M, Keegstra K. Cell-wall carbohydrates and their modification as a resource for biofuels. Plant J (2008) 54:559-568.
[0113] 46. Pena M J, et al. Arabidopsis irregular xylem8 and irregular xylem9: implications for the complexity of glucuronoxylan biosynthesis. The Plant cell (2007) 19:549-563.
[0114] 47. Perrin R M, et al. Xyloglucan fucosyltransferase, an enzyme involved in plant cell wall biosynthesis. Science (New York, N.Y. (1999) 284:1976-1979.
[0115] 48. Persson S, et al. The Arabidopsis irregular xylem8 mutant is deficient in glucuronoxylan and homogalacturonan, which are essential for secondary cell wall integrity. The Plant cell (2007) 19:237-255.
[0116] 49. Remm M, Storm C E, Sonnhammer E L. Automatic clustering of orthologs and in-paralogs from pairwise species comparisons. Journal of molecular biology (2001) 314:1041-1052.
[0117] 50. Richmond T A, Somerville C R. Integrative approaches to determining Csl function. Plant molecular biology (2001) 47:131-143.
[0118] 51. Somerville C, et al. Toward a systems approach to understanding plant cell walls. Science (New York, N.Y. (2004) 306:2206-2211.
[0119] 52. Tuskan G A, et al. The genome of black cottonwood, Populus trichocarpa (Torr. & Gray). Science (New York, N.Y. (2006) 313:1596-1604.
[0120] 53. Wall D P, Fraser H B, Hirsh A E. Detecting putative orthologs. Bioinformatics (Oxford, England) (2003) 19:1710-1711.
[0121] 54. Wimmerova M, Engelsen S B, Bettler E, Breton C, Imberty A. Combining fold recognition and exploratory data analysis for searching for glycosyltransferases in the genome of Mycobacterium tuberculosis. Biochimie (2003) 85:691-700.
[0122] 55. Wrabl J O, Grishin N V. Homology between O-linked GlcNAc transferases and proteins of the glycogen phosphorylase superfamily. Journal of molecular biology (2001) 314:365-374.
[0123] 56. Yokoyama R, Nishitani K. Genomic basis for cell-wall diversity in plants. A comparative approach to gene families in rice and Arabidopsis. Plant & cell physiology (2004) 45:1111-1121.
[0124] 57. York W S, O'Neill M A. Biochemical control of xylan biosynthesis—which end is up? Curr Opin Plant Biol (2008) 11:258-265.
[0125] 58. Young N D, et al. Sequencing the genespaces of Medicago truncatula and Lotus japonicus. Plant physiology (2005) 137:1174-1181.
[0126] 59. Yu J, et al. The Genomes of Oryza sativa: a history of duplications. PLoS biology (2005) 3:e38.
[0127] 60. Yuan Q, et al. The institute for genomic research Osa1 rice genome annotation database. Plant physiology (2005) 138:18-26.
[0128] 61. Zhang J, et al. RMD: a rice mutant database for functional analysis of the rice genome. Nucleic acids research (2006) 34:D745-748.
[0129] 62. Zhang J Z. Evolution by gene duplication: an update. Trends in Ecology & Evolution (2003) 18:292-298.

[0130] Each of the references described above are herein incorporated by reference as though each is individually and specifically indicated as being herein incorporated by reference.

[0131] The invention having been described, the following examples are offered to illustrate the subject invention by way of illustration, not by way of limitation.

### EXAMPLE 1

### Construction of a Rice Glycosyltransferases Phylogenomic Database and Identification of Rice-Diverged Glycosyltransferases

[0132] With completion of rice (Oryza sativa ssp. japonica) genome sequencing and deposition of a large number of GTs in the CAZy database, we now have the opportunity to identify all the rice GTs and analyze them on a whole genome scale (IRGSP, 2005). In this study, we identified 609 rice GT loci (769 gene models) and executed a set of genome-scale analyses on these GTs. We used the data to identify GTs that have diverged significantly compared with dicot GTs and that may contribute to the synthesis of Type II specific cell wall components or be responsible for more subtle divergences in cell wall structure and function (e.g., different functions throughout development in type I vs. type II walls). We also report construction of a phylogenomic database for rice GTs (http://ricephylogenomics.ucdavis.edu/cellwalls/gt/), which provides a logical format to integrate, host and display diverse sets of functional genomic information in a phylogenetic context, thereby facilitating plant cell wall research. Using the database, we identified 33 rice-diverged GT genes (45 gene models) that are rice-diverged in vegetative, above-ground tissues and are strong candidate genes for further functional analysis toward understanding and manipulating grass cell walls for biofuel production.

[0133] Glycosyltransferases (GTs; EC 2.4.x.y) constitute a large group of enzymes that form glycosidic bonds through transfer of sugars from activated donor molecules to acceptor molecules. GTs are critical to the biosynthesis of plant cell walls. Based on the Carbohydrate-Active enZymes (CAZy) database and sequence similarity searches, we have identified 609 potential GT genes (loci) corresponding to 769 transcripts (gene models) in rice (Oryza sativa), the reference monocotyledonous species. Based upon their domain composition and sequence similarity, these rice GTs are classified into 40 CAZy families plus an additional unknown class. We found that two Pfam domains of unknown function, PF04577 and PF04646, are associated with GT families GT61 and GT31, respectively. We created a phylogenomic Rice GT Database (http://ricephylogenomics.ucdavis.edu/cellwalls/gt/) to facilitate functional analysis of this important and large gene family. Through the database, several classes of functional genomic data, including mutant lines and gene expression data, can be displayed for each rice GT in the context of a phylogenetic tree allowing for comparative analysis both within and between GT families. Comprehensive digital expression analysis of public gene expression data, revealed that most rice GTs are expressed. Based on analysis with Inparanoid, we identified 282 “rice-diverged” GTs that lack orthologs in sequenced dicots (Arabidopsis thaliana, Populus tricocarpa, Medicago truncatula and Ricinus communis). Combining these analyses, we have identified 33 rice-diverged GT genes (45 gene models) that are rice-diverged in above-ground, vegetative tissues and thus are good targets for functional examination toward understanding and manipulating grass cell wall qualities. This list of 33 genes and the GT database will facilitate the study of cell wall synthesis in rice and other plants.

### Methods

### Identification of Rice GTs and Database Construction

[0134] We searched the CAZy database (http://www.cazy.org/) and downloaded all the rice GTs hosted in this database (Campbell et al., 1997; Coutinho et al., 2003). Because genes in CAZy are associated with different kinds of gene names, including RAP2 (Rice Annotation Project Version 2) IDs, NCBI IDs, common names and TIGR IDs, all identifiers were converted to TIGR Version 5 IDs using the RAP ID Converter (http://rapdb.dna.affrc.go.jp/tools/converter) and NCBI BLAST Version 2.2.17 searches (Altschul et al., 1990). Arabidopsis GTs from CAZy and identified by fold recognition (Egelund et al., 2004), were also used to scan all the annotated proteins in the rice (Oryza sativa ssp. japonica) genome at TIGR (Version 5) (Ouyang et al., 2007; Yuan et al., 2005), to find the corresponding rice homologs (i.e., homolog search). In addition, the GT-related domains from the Pfam database (http://pfam.sanger.ac.uk/) were used to search the rice genome to identify putative GTs containing GT-related domains using HMMER 2.3.2 (i.e., domain search) (Finn et al., 2006). Finally, the GTs identified by previous steps were used to search the corresponding paralogs using the TIGR Paralog Family Classification database (i.e., paralog search) (Lin et al., 2008). After assembling the initial putative rice GT list, the Pfam and Interpro databases (http://www.cbi.ac.uk/interpro/) were used to check if the candidates have GT related domains (Finn et al., 2006; Mulder et al., 2007). Except as mentioned in the Results, genes lacking a GT-related domain and not annotated as GT-related genes in the TIGR annotation database, were deleted from the current list. Additionally, 5 TE-related candidates were also discarded. A phylogenomic database was then constructed with ASP.NET and MSSQL, run on a Windows 2003 server. The http address is http://ricephylogenomics.ucdavis.edu/cellwalls/gt/.

### Phylogenetic Analysis

[0135] For each GT family with more than three members the corresponding GT domain sequences were extracted according to the Pfam and Interpro domain assignments. We aligned GT domain sequences in these families using Clustal W version 2.0 with default options (Larkin et al., 2007). The alignments were then corrected manually using the alignment editor software BioEdit Version 7.0.09 (http://www.mbio.ncsu.edu/BioEdit/bioedit.hlml). The unrooted, phylogenetic tree was constructed with the neighbor-joining method executed in PHYLIP version 3.67 (http://evolution.genetics.washington.edu/phylip.html) using only the domain sequences. Bootstrapping can provide an estimate of the confidence for each branch point, so 1000 bootstraps were adopted to infer the statistical support for the tree.

### Orthology Detection in Dicots

[0136] Inparanoid Version 2.0 was adopted to evaluate the orthology relationships among rice and sequenced, annotated dicots on the whole-genome scale (Remm et al., 2001). The Arabidopsis genome sequences were downloaded from the Arabidopsis Information Resource (TAIR8, http://www.arabidopsis.org/), P. trichocarpa from the DoE Joint Genome Institute and Poplar Genome Consortium annotation v1.1 (http://genome.jgi-psf.org/Poptr1_{—}1/) (Tuskan et al., 2006), M. truncatula from the Medicago Genome Sequence Consortium (MGSC) Mt2.0 release (http://www.medicago.org/) (Young et al., 2005), and R. communis from the TIGR Castor bean Database (http://castorbean.tigr.org/).

### Digital Expression Analysis (EST, MPSS and Microarray)

[0137] EST Analysis. The TIGR Digital Northern search page (http://www.tigr.org/tdb/e2k1/osa1/dnav.shtml) provides the number of ESTs from several different rice tissues mapped onto TIGR gene models and was used for digital expression analysis of rice GTs (Jung et al., submitted). Each of the TIGR locus IDs corresponding to all rice GT gene models was searched to find availability of corresponding EST evidence. The EST evidence was determined using the PASA program which utilizes a number of alignment programs to maximally align transcripts to the genome (Haas et al., 2003). The minimal alignment allowed by the PASA program is 95% identity over 90% length of the transcript.

[0138] MPSS Analysis. Expression evidence from MPSS tags was determined from the rice MPSS project (http://mpss.udel.edu/rice/) mapped onto the TIGR rice gene models. We used only the sense strand signatures (Classes 1, 2, 5 and 7) which have only one hit on the rice pseudomolecules and show a perfect match (100% identity over 100% of the length of the tag) in the analysis. The normalized abundance (tags per million, TPM) of these signatures for a given gene in a given library represents a quantitative estimate of expression level of that gene. MPSS expression data for 17 by signatures from 18 libraries representing 12 different tissues/organs of rice were used. The description of these libraries is: NCA, 35 days callus; NCL, 14 days young leaves stressed in 4 C cold for 24 h; NCR, 14 days young roots stressed in 4° C. cold for 24 h; NDL, 14 days young leaves stressed in drought for 5 days; NDR, 14 days young roots stressed in drought for 5 days; NGD, 10 days germinating seedlings grown in dark; NGS, 3 days germinating seed; NIP, 90 days immature panicle; NL4, 60 days mature leaves (combination of replicates); NME, 60 days crown vegetative meristematic tissue; NPO, mature pollen; NR2, 60 days mature roots (combination of replicates); NSL, 14 days young leaves stressed in 250 mM NaCl for 24 h; NSO, ovary and mature stigma; NSR, 14 days young roots stressed in 250 mM NaCl for 24 h; NST, 60 days stem; NYL, 14 days young leaves; NYR, 14 days young roots.

[0139] Microarray Analysis. The raw data for rice Affymetrix microarray experiment designed to profile the expression pattern of rice reproductive development was downloaded from the NCBI Gene Expression Omnibus (GEO, http://www.ncbi.nlm.nih.gov/geo/) (Jain et al., 2007). The GEO accession number is GSE6893. Then MAS 5.0 method provided by the R package, affy, for the Affymetrix rice array was used to conduct background correction, normalization, probe specific background correction, probe summarization and convert probe level data to expression values (Affymetrix, 2001). The trimmed mean target intensity of each array was arbitrarily set to 500. These data were then log₂ transformed. The rice Multi-platform Microarray Search tool (http://www.ricearray.org/matrix.search.shtml) was used assign the corresponding Affymetrix probe sets for rice GTs. We only included unique probe sets that match unique rice locus in the analysis (Jung et al., submitted). If several unique probe sets were available for a single rice GT gene model, we selected the probe set with the highest expression. The heatmap was generated by the TIGR MultiExperiment Viewer v4.1 (MeV, http://www.tm4.org/mev.html).

[0140] Identification of Rice GT Gene-indexed Mutant Lines and Relating Rice Functional Genomic Databases. Several rice mutant line libraries are available, including the National Institute of Agrobiological Sciences (NIAS) Tos17 Insertion Mutant Database (Miyao et al., 2003); the UCD Rice Transposon Flanking Sequence Tag Database with Ds Knockout (KO) lines (Kolesnik et al., 2004); the Oryza Tag Line (OTL) Database with Tos17 and T-DNA KO lines; the Rice Mutant Database (RMD) with T-DNA KO lines (Zhang et al., 2006); the Taiwan Rice Insertional Mutants Database (TRIM) with T-DNA KO lines; and the Postech Rice T-DNA Insertion Sequence Database with T-DNA KO and Activation (AC) lines (An et al., 2003; Jeong et al., 2006). The OryGenesDB database (http://orygenesdb.cirad.fr/index.html) was used to map flanking sequence tags (FSTs) from the different mutant libraries onto rice GTs (Droc et al., 2006). The flanking sequences have been placed in the TIGR Version 5 pseudomolecules by finding the highest hit based on an e⁻¹⁰ cut-off. The mapped insertions were then assigned to rice GT genes based on the insertion map locations relative to the TIGR genome annotations. In the OryGenesDB database, a gene was defined as beginning 800 by 5′ of the initiation codon and to the end of the 3′-UTR, where known. The Postech activation lines were obtained from the Postech Rice T-DNA Insertion Sequence Database (http://141.223.132.44/pfg/index.php) (Jeong et al., 2006).

### Results and Discussion

[0141] Identification of Rice GTs. Glycosyltransferases from across the kingdoms of life have previously been identified based upon domain compositions, sequence similarity and function. The CAZy database is a comprehensive database for carbohydrate enzymes that degrade, modify, or create glycosidic bonds. CAZy classifies GTs into different families primarily based on amino acid sequence similarities (Campbell et al., 1997; Coutinho et al., 2003). As of February 2008, there were 90 GT families and 33,359 entries in the CAZy database. We identified a total of 548 rice GT genes (loci) from this database. We then converted the Rice Annotation Project and other various identifiers associated with the rice GTs from CAZy into The Institute of Genomic Research (TIGR) Version 5 Locus Identifiers (IDs) for convenience in the further analysis. Not all GTs are included in the CAZy database (Egelund et al., 2004). Thus, we took advantage of the availability of the complete rice genome sequence to identify GT genes not included in the CAZy database through homolog, domain and paralog searches to identify additional “non-CAZy” rice GTs (IRGSP, 2005). Searching of the rice genome with the known GTs led to the identification of an additional 34 GTs by homolog search, 12 GTs by domain search and 15 GTs by paralog search (see Materials and Methods).

[0142] In total, 609 rice GT genes were identified in our analysis and classified into 40 CAZy families and an additional unknown class. One hundred and seven of these GT genes are predicted to code for 160 additional alternative splicing isoforms, resulting in a total of 769 GT transcripts (gene models) encoded in the rice genome. The 609 rice GT loci were found to be distributed randomly on all the 12 rice chromosomes with the maximum number present on the largest chromosome 1 (85) and minimum on chromosome 11 (16). BLASTP searching with these 769 GT proteins in the FGENESH-annotated proteins of Oryza sativa ssp. indica genome available at BGI Rise Rice Genome Database (http://rise.genomics.org.cn/rice) revealed that nearly all of these proteins ( 767/769 with E value<e⁻²⁰) are conserved in both rice subspecies (Yu et al., 2005). A domain search of rice GT proteins in Pfam and Interpro databases identified at least one GT related domain for each GT family except for four families. Although there is no GT related domain annotated in GT41 and GT65, they were retained because they were obtained from the CAZy database. That database also provides no GT-related domain for these two families. Furthermore, genes in these families are annotated as glycosyltransferase genes in the TIGR annotation database. GT77 also does not have a GT-related domain and the members are annotated as regulatory proteins rather than GT proteins in the TIGR database. However, rice members of this GT family have very high sequence similarities with Arabidopsis GT77 proteins, RGXT1 (At4g01770) and RGXT2 (At4g01750). RGXT1 and RGXT2 were identified via a fold recognition method and then experimentally validated (Egelund et al., 2006; Egelund et al., 2004). We therefore included rice GT77 proteins in the list. GT61 proteins and some members of the GT31 family also do not possess domains that are annotated as GT-related. Rather, we found that two Pfam domains of unknown function, PF04577 and PF04646, are associated with these rice GT families, respectively. All 39 GT61 family members contain Pfam domain PF04577. Fourteen out of 58 GT31 members contain PF04646 domain; whereas, the other GT31 members contain a galactosyl transferase domain, PF01762. Although the function of these two domains (PF04577 and PF04646) is unknown in the current Pfam database, they should be considered as GT related domains according to this observation.

[0143] Database Construction and Navigation. Though the GT section of the CAZy database is reasonably comprehensive in scope, it lacks depth of information on each GT, limiting further functional and reverse genetic analyses of this large gene family. Several kinds of functional genomic data are now available, such as expression data from expressed sequence tags (ESTs), massively parallel signature sequencing (MPSS) and oligonucleotide microarrays. However, these data are scattered in different databases and are not easily integrated for comparison between and within different rice GT families. To resolve this problem, we created a publicly accessible, phylogenomic database, the Rice GT Database (http://ricephylogenomics.ucdavis.edu/cellwalls/gt/) to integrate, host and display functional genomic data for rice GTs in a phylogenetic context. As listed in Table 1, eight types of functional genomic data were gathered for rice GTs and are available in this database, including sequence and ortholog information, mutant availability, protein topology predictions, and gene expression data. Further information about the development and content of the Rice GT database are provided in subsequent sections.

TABLE 1
Data available in the Rice GT Database.

| Data Type | Description |
|---|---|
| Sequence | TIGR and RAP annotations, CAZy families, GT domains and NCBI BLAST links |
| Information | |
| Sequence Quality | FL-cDNA/EST evidence, BAC/PAC and PASA status |
| Orthologs in Dicots | Orthologs identified in four selected dicot species using Inparaniod2 |
| Mutants | Knockout and Activation mutant lines from several mutant libraries |
| Topology | Predicted protein topology (such as transmembrane domain) and subcellular localization |
| MPSS Data | MPSS data determining the representation of transcripts within mRNA and regulatory |
| | small RNA |
| Digital Northern | Number of EST evidences within different rice tissues/organs from TIGR database |
| Data | |
| Microarray Data | There are three kinds of microarray platforms available in the database until now: |
| | Affymetrix, NSF 20K and BGI/Yale. Several hundreds slides are presented and heatmaps |
| | are also provided for easy visualization. |

[0144] To assist in use of the Rice GT Database, links to the database information, database search, chromosome distribution map and phylogenetic tree viewer are provided on the home page. To aid comparisons within and between GT clades, most data is available in the context of a phylogenetic tree of rice GTs. In the tree viewer page, functional genomic fields can be selected by checking each box (FIG. 1). Pressing the submit button will display the selected data adjacent to the GT phylogenetic the tree (FIG. 2). The spreadsheet format allows all data or user-defined subsets of data to be readily transferred into any database or software, such as Excel, for further analysis. Once displayed, the spreadsheet can be searched for a particular locus ID or other field with the user's browser search function. Clicking on a gene model ID (12XXX.mXXXX) link brings up a summary webpage for that gene model showing all of the available data except for the microarray data, but including histogram representations of expression patterns from Digital Northern and MPSS data (FIG. 3) Links to the TIGR rice database, Rice Annotation Project Database (RAP-DB), CAZy database and NCBI BLAST search, are given for easy navigation. These links allow for simple navigation between all data display formats as well as complementary databases. Mutant line identification numbers are given as hyperlinks to the corresponding library when phenotypic information is available for that mutant. For display of microarray data, users may toggle between displaying numerical values for each replicate or averages for each sample. With separate links, we have also built red-green heatmaps for the easy examination of each microarray dataset. The chromosome distribution map is color coded according to the different CAZy families and rice GT loci are represented as colored boxes. Mousing over each box generates a pop up showing the ID of each rice GT locus. Clicking on the box directs the user back to the Tree viewer page, with the selected rice GT at the top of the view window. A search function is also available, enabling users to search the database with a locus ID or BLAST search.

[0145] Phylogenetic Analysis. Phylogenetic trees display a sorting of genes into groups based on sequence similarity and are particularly valuable when studying large gene families (Jung et al., 2008). Sensitive sequence-similarity detection methods such as hydrophobic cluster analysis or PSI-BLAST have revealed only very low sequence similarities between some GT families (Campbell et al., 1997; Wrabl and Grishin, 2001). These distant similarities, presumably a result of evolutionary divergence, make it difficult to construct a single phylogenetic tree using all the rice GTs from different GT families. Rather we adopted the hierarchical classification approach presented by Countinho et al. to build an assembled whole phylogentic tree (Coutinho et al., 2003).

[0146] The forty GT families are hierarchically classified based on their GT fold type, reaction mechanism and known activities. This classification is shown in FIG. 4. There are two different GT domains in GT2, GT28 and GT31, so these GT families were divided into two subfamilies according to GT domain. Then the unmated phylogenetic trees were constructed in each GT family or subfamily with more than three members based on GT domain sequences and neighbor-joining method. For GT families with less than three members, the phylogenetic relationships among their members were determined manually. There is no GT related domain in GT77, thus the whole protein sequences were used for the phylogenetic analysis in this family. Finally, all the trees were assembled into a whole phylogenetic tree according to the family hierarchical classification.

[0147] Interspecies Comparison Identifying Rice-Diverged GTs. In principle, the difference between type I and type II cell wall polysaccharide content might be reflected by qualitative difference in the GT content among reference plant species. To test this hypothesis we compared the distribution of GT gene models between rice and the two dicots for which GTs have been comprehensively annotated, Arabidopsis and poplar (FIG. 5). In Arabidopsis, there are 452 GT genes (507 gene models) based on the content of the CAZy database and fold recognition (Egelund et al., 2004). Poplar contains approximately 840 GT gene models, which is the largest number of genes encoding glycosyltransferases observed among fully sequenced genomes (Geisler-Lee et al., 2006). The poplar genome annotation is not yet complete on the gene loci level, so we conducted this analysis on the level of gene models, which includes different splice forms from single loci.

[0148] Except as noted below, we found the same GT families in rice, Arabidopsis, and poplar (FIG. 5). This result is consistent with a previous analysis that found that all known cell wall related GT families at the time are found in both rice and Arabidopsis (Yokoyama and Nishitani, 2004). The one exception to representation in all three species is GT76, which is absent from the poplar genome annotation. However, we detected a GT76 member in the poplar genome (E<e⁻¹⁰⁰) with a BLASTP search with the single members of the GT76 family from Arabidopsis and rice. Thus the absence in poplar is likely due to the incomplete genome annotation at the time of poplar GT identification. The GT1 family, responsible for glycosylation of secondary metabolites but not cell wall synthesis, is the largest family in all three species. Excluding GT1, the top 5 largest GT families in rice are GT2, GT4, GT8, GT31 and GT47, which is also the case for Arabidopsis and poplar.

[0149] Seven GT families appear to have significantly greater representation in the rice genome compared to Arabidopsis and poplar. GT families 5, 28, 30, 33, 37, 43, and 61 contain >2-fold the number of genes in rice versus the two dicots (FIG. 5). The first four of these seven families are not expected to be involved in cell wall synthesis (FIG. 4). GT5s are glycogen glucosyltransferases; GT28s are diacylglycerol galactosyltransferases; GT30s are mannooctulosonic acid transferases; and GT33s are involved transfer of mannose residues to endoplasmic reticulum associated-proteins (O′Reilly et al., 2006). The final three families on this list are known or hypothesized to catalyze synthesis of cell wall polysaccharides. GT37s include orthologs of the Arabidopsis FUT proteins, which possess α-fucosyltransferase activity involved in xyloglucan synthesis (Perrin et al., 1999). The increase in number of genes in this family in rice compared to Arabidopsis has been noted previously (Yokoyama and Nishitani, 2004). Whether the family possess the same activity in grasses, which possess far lower quantities of xyloglucan, remains to be seen. In the GT43 family, the Arabidopsis gene, IRX9, has recently been implicated in synthesis of xylan in secondary cell walls (Lee et al., 2007a; Pena et al., 2007). Mitchell et al. also identified genes in the GT43 and GT61 families as having higher expression in cereals than in dicots, though those authors did not note the relative increase in number of genes in those families (Mitchell et al., 2007). This coarse analysis of the numbers of genes in various GT families begins to suggest gene families for further exploration toward understanding the synthesis of grass cell walls. Subsequent analyses provide further information toward choosing specific genes for reverse genetic analysis.

[0150] Although the same GT families are present in the reference monocot rice and dicots, Arabidopsis and poplar, we hypothesized that within each GT family that “rice-diverged” GTs with significantly different primary sequences compared to dicots may have evolved since the last common ancestor between rice and dicots. Orthology detection (and conversely detection of genes that lack orthologs) is critically important for accurate functional annotation, and has been widely used to facilitate studies on comparative and evolutionary genomics (Chen et al., 2007). We hypothesize that differences in primary sequence might be a proxy for functional divergence in some cases. The ongoing individual gene duplication events in the rice genome provides duplicated genes that can serve as raw materials for genesis of new genes (Yu et al., 2005). A large part (about one third, data not shown) of rice GTs are involved in tandem and segmental duplication events, and substantial clustering of rice GTs is evident on different chromosomes. Thus, some rice-diverged GTs may have evolved after duplications, through a process known as neo-functionalization in which duplicated genes obtain novel functions compared to ancestral genes (Zhang, 2003). In support of this approach with respect to cell wall-related genes, phylogenetic analysis of the Csl genes within the GT2 family of rice and Arabidopsis led to the identification of rice-diverged Cs1 gene families Cs1F and Cs1H (Hazen et al., 2002). Subsequent heterologous expression studies demonstrated that the Cs1F gene family is involved in synthesis of the Type II wall-specific mixed linkage glucan polysaccharide (Burton et al., 2006).

[0151] We computationally identified rice-diverged GTs by detecting which rice GTs lack orthologs in sequenced dicots. Several ortholog identification methods are now available, including methods such as, reciprocal smallest distance (Wall et al., 2003), Inparanoid (Remm et al., 2001) and BLASTP (Altschul et al., 1990), among others. Inparanoid exhibited the best overall performance, with both low false negative and false positive rates, within a orthology detection strategy assessing experiment on divergent eukaryotic genomes (Chen et al., 2007). Inparanoid is an automated method for finding orthologs and “in-paralogs” from two species. It functions by detecting ortholog clusters with two-way best pairwise matches then it adds related, in-paralogs, predicted to have diverged since speciation (Remm et al., 2001).

[0152] We used Inparanoid Version 2.0 to identify rice GT orthologs in the completely sequenced dicots, Arabidopsis (family: Brassicaceae), poplar (Salicaceae), medick (Medicago truncatula, Fabaceae) and castor bean (Ricinus communis, Euphorbiaceae). Based on orthology search in these selected dicots, 282 rice GTs (36.7%) lacked orthologs and were therefore considered to be rice-diverged GTs. One hundred and ninety seven (70%) of these are expressed based on FL-cDNA or EST evidence. From the analysis of Chen et al., we expect that the number of rice-diverged GTs may be high, due to Inparanoid's rate of the false negative of ortholog identification in their tests (false negative rate=0.17) (Chen et al., 2007). In addition, a smaller number of rice-diverged GTs may have been missed in our analysis based on the identification of false positives by Inparanoid (false positive rate=0.07) (Chen et al., 2007).

[0153] We speculate that the putative rice-diverged GTs that we have identified may also be grass-diverged due to the high level of genomic colinearity among grass species (Devos and Gale, 2000). In the future we plan to test the generality of this analysis by comparing dicot and rice GTs with other grasses, including Brachypodium, sorghum, and maize, as annotation for these recently sequenced genomes becomes available.

[0154] As will be discussed further below for specific cases, some of the genes that we have identified as “rice-diverged” were also identified by Mitchell et al. as “rice-diverged rice orthologs of Arabidopsis genes”. Mitchell et al. used BLASTP (bit score 200) to identify rice-Arabidopsis ortholog pairs (Mitchell et al., 2007). According the analysis of Chen et al., BLASTP has a high false positive rate (0.5) compared with other ortholog detection methods (Chen et al., 2007). While this was appropriate for Mitchell et al., who otherwise might have missed a number of preferentially grass-expressed genes, it explains why this study and that previous one have identified the same genes using apparently opposite methods.

[0155] Digital Expression Analysis. Phylogenetic trees can provide a context to identify members within gene families that have unique properties, including unique expression patterns (Dardick et al., 2007; Jung et al., 2008). Gene expression patterns can inform hypothesis regarding which gene family members are expected to perform distinct or similar roles. Predominant, or higher expression, of one or more gene family members under a particular set of conditions may indicate a role for the predominantly expressed gene in the process under examination. For example, we recently found evidence that gene family members predominantly expressed in the light were more likely to have a role in light responses compared with genes in the same family that were lowly expressed in the light (Jung et al., 2008b). Thus, we sought to further refine the list of rice-diverged genes for reverse genetic analysis using three classes of publicly available transcriptome information, EST, MPSS and microarray data.

[0156] EST Analysis. We analyzed rice EST data using the TIGR Rice Gene Expression Anatomy Viewer and Digital Northern (http://rice.plantbiology.msu.edu/dnav.shtml), which provides the number of ESTs from different rice tissues mapped onto the TIGR gene models to estimate gene expression levels (Jung et al., submitted). This analysis revealed that one or more EST has been recorded for 628 (81.7%) of 769 rice GT gene models, providing strong indication that most rice GTs are expressed. In contrast, just less than 60% of all TIGR version 5 gene models have EST evidence (Jung et al. 2008b). However, the frequency of total ESTs for rice GT gene models varied greatly from 1 to 770, suggesting that the expression levels among rice GTs vary dramatically.

[0157] TIGR Digital Northern data covers ESTs isolated from 20 rice tissue sources (anther, callus, endosperm, flower, immature seed, leaf, mixed tissues, panicle, phloem, pistil, root, root tip, seed, seedling, sheath, shoot, stem, suspension cells, unknown samples and whole plant), but rice GTs were found to only expressed in 12 tissues (Table 2). The absence of expression evidence in other tissues may be due to the small number of ESTs sequenced in the libraries from these plant parts. For example the phloem tissue library only contains eight ESTs. Among the plant materials that show evidence of GT expression, callus has the largest number of expressed GTs (408), followed by shoot (395). In leaf tissue, only 188 (24.4%) rice GTs have EST evidence, although the leaf library has the largest number of ESTs (204,353). Low representation of diverse GTs in leaf tissue may be due to relative cell wall homogeneity in leaves compared with other tissues or temporal regulation of GT expression such that many GTs involved cell wall synthesis during early developmental stages are no longer expressed in the mature tissues. Alternatively, the difference may be due to different coverage of the actual total of expressed genes from different libraries, for example if leaf libraries are biased due to very high levels of a few genes, such as those involved in photosynthesis. Among the 282 rice-diverged GTs, 46 (16.3%) and 104 (36.9%) are expressed in leaf and shoot, respectively.

TABLE 2
Distribution of expressed GT gene models
among different EST libraries.

| | | No. of Expressed | No. of Expressed |
|---|---|---|---|
| | | Rice Gene | GT Gene |
| EST Library Source | No. of ESTs | Models | Models |
| Total ESTs | | 33,807 | 628 |
| Callus | 184,189 | 20,401 | 408 |
| Shoot | 139,157 | 20,092 | 395 |
| Mixed Tissues | 99,921 | 17,213 | 371 |
| Panicle | 150,845 | 15,052 | 307 |
| Flower | 51,582 | 13,552 | 277 |
| Root | 79,340 | 11,406 | 241 |
| Seed | 26,407 | 9,996 | 203 |
| Unknown Samples | 53,978 | 10,645 | 199 |
| Pistil | 77,110 | 10,725 | 193 |
| Leaf | 204,353 | 10,750 | 188 |
| Anther | 14,156 | 1,191 | 34 |
| Whole Plant | 64,601 | 2,219 | 21 |

[0158] MPSS Analysis. We also extracted information from the Rice MPSS Project (http://mpss.udel.edu/rice/) for each GT gene model. Massively parallel signature sequencing consists of deep, high throughput sequencing of short segments of expressed transcripts and can provide a sensitive, quantitative measure of gene expression for nearly all genes in the genome (Brenner et al., 2000). Data from 18 MPSS libraries representing 12 different tissues/organs of rice was extracted for 17 base pair (bp)-tag signature libraries. MPSS tags were available for 628 (81.7%) GT gene models, providing further evidence that most rice GTs are expressed. As in the EST data, substantial differences were found in abundance of different rice GT gene models in tags per million (TPM), with expression varying from marginal (1-3 TPM) to strong (>250 TPM) expression. The distribution of expressed GT gene models among different MPSS libraries at different expression levels is shown in FIG. 6. A large percentage (30%-50%) of rice GTs exhibited moderate expression (26-250 TPM), while only a few genes were expressed at a high level (>250 TPM).

[0159] In general, the EST counts data and MPSS TPM data for GTs are in reasonable agreement, though differences exist. Often MPSS data suggest that a higher percentage of GTs are expressed in a particular tissue in comparison with the EST results. For example, MPSS analysis indicates that the root has the largest number of expressed GT gene models (390, 50.7%), but the EST data only provide evidence for 241 GT gene models (31.2%). Similarly in leaf tissue, MPSS data indicate that there are 294 (38.2%) expressed rice GTs, a larger number GTs than is found in EST leaf-derived libraries (188). The exception is callus tissue, for which MPSS data indicate a lower number of GTs are expressed compared with EST data, 270 (35.1%) versus 408, respectively. There are two technical possibilities to explain this difference. The first is that ESTs from genes with low or specific expression in specific tissues and/or development stages are difficult to detect by lower throughput EST sequencing. Alternatively, marginal and very lowly expressed tags (1-3 and 4-10 TPM) identified by MPSS may represent false positive signals. If GTs with marginal and very low expression are excluded from the MPSS analysis, the number of expressed GTs is similar between EST and MPSS libraries. For example 188 and 174 expressed GTs in leaf tissue based on EST and MPSS, respectively, and 241 and 227 in root, respectively. However this method of raising the threshold for what is expressed by MPSS does not address the root cause of the difference, which can only be addressed by even deeper expression analysis through sequencing.

[0160] Microarray Analysis. In addition to sequence based expression analysis methods, we also used publicly available data from rice microarrays, which rely on hybridization of transcript-derived sequences to arrayed DNA oligonucleotides (oligos). Microarrays allow biologists to measure the amounts of individual transcripts for tens of thousands of genes simultaneously, thus providing a high-throughput tool for analyzing gene expression at the whole genome level. Four platforms of rice whole genome oligo arrays have been developed and several hundred datasets from them are available in the public microarray database, NCBI Gene Expression Omnibus (GEO, http://www.ncbi.nlm.nih.gov/geo/). Depending on the array design, these array data are applicable for analyzing expression of subsets of genes of interest. Microarray data from 430 hybridizations, including those from the rice Affymetrix (148), NSF 20K (114) and BGI/Yale platforms (168), are available in a phylogenetic context in the Rice GT Database.

[0161] Here, for comparison with the EST and MPSS data sets, we used the rice Affymetrix microarray data of Jain et al. to profile expression patterns for different tissues and developmental stages (Jain et al., 2007). The rice tissues and developmental stages included in this dataset include seedling, root, mature leaf, young leaf, shoot apical meristem (SAM), and various stages of panicle (P1-P6) and seed (S1-55) development (Jain et al., 2007). Following whole-chip data processing, we extracted and averaged the log₂ signal values for the 634 rice GTs represented on the array. These data are represented as a heatmap in the context of the rice GT phylogenetic tree. Among the 634 rice GTs represented by the Affymetrix microarray, 618 (97.5%) have a log₂ signal value >5 (corresponding spot intensity is 32) in at least one of the rice tissues and developmental stages analyzed, indicating again that most of rice GTs are expressed. The expression levels were different among GT families and GTs within same family. For example, most members in GT75 are rice-diverged in all tissues and developmental stages, while low expression was detected in almost all members in GT1.

[0162] Gene expression of the rice genes in the GT47 and GT61 families are shown in FIG. 7. Mitchell et al. identified genes in the GT47 (13-glucuronyltransferase and heparan synthase) and GT61 (xylosyltransferase) families as likely candidates for involvement in glucuronoarabinxylan synthesis (Mitchell et al., 2007). Due to the high levels of this polysaccharide in rice primary cell walls, we expect these GTs to be rice-diverged in rice. From FIG. 7 it is clear that most of GT47 members are lowly expressed, with only a cluster of nine gene models (6 loci) with high expression. These six loci were also identified by Mitchell et al. as having high expression in monocots relative to dicots; whereas, that study found that other GT47 genes with low expression in rice were found to have similar expression levels between grasses and dicots (Mitchell et al., 2007). Agreement between this study provides mutual support for the potential importance of the group of genes in type II cell wall synthesis, and for the complementary methods used to identify this gene family. Furthermore, among the six rice-diverged GT47 loci, five were identified to be rice-diverged GTs, while 25 out of the other 42 low expressed members have orthologs in dicots. This further supports that only the rice-diverged GT47 genes might be the candidates for the arabinoxylan biosynthesis.

[0163] In contrast to the expression of GT47 family members, most GT61 gene models are rice-diverged in at least one tissue or developmental stage. All GT61 members were found to have higher expression in grasses compared to dicots in the Mitchell et al. study. These observations indicate that most GT61 members should be candidates for the glucuronoarabinoxylan biosynthesis. In this family, GTs with similar gene expression patterns appear to cluster together within the phylogenetic tree, suggesting that gene redundancy may be a barrier to functional studies. Simultaneous silencing of multiple genes in this family may be required for loss of function analyses (Miki et al., 2005). Thus, the availability of a large amount of microarray data and other gene expression data in the Rice GT Database, combined with the phylogenetic tree, provides a powerful tool to study the rice GTs expression patterns and functions.

[0164] Identification of Rice-Diverged GTs with High Expression in Above Ground Tissues. Most plant biomass under consideration for lignocellulosic biofuel production consists of vegetative, above-ground tissues, such as leaves, stems, shoots, and the progenitor of these tissues, the shoot apical meristem. Thus, identification of rice-diverged GTs with high expression in vegetative, above-ground tissues and elucidation their function is likely to assist effort to alter the composition of lignocellulosic biomass from grasses. To identify potential grass-diverged genes that show consistent expression in above ground tissues, we identified rice-diverged genes that show moderate to high gene expression in at least two of the three gene expression datasets previously described, i.e., rice EST, MPSS, and microarrays. The datasets examined consist of leaf and shoot EST libraries; young leaf, leaf, shoot and meristem MPSS libraries; and young leaf, mature leaf, seedling, shoot and meristem hybridizations from the Affymetrix microarray data. For each type of evidence, we selected rice-diverged GTs in the top 25% most rice-diverged genes in at least one vegetative, above ground tissue. The 25% criteria were chosen to represent moderately to rice-diverged genes as almost half of all annotated rice gene models are not represented by ESTs (Jung et al., 2008b). Although somewhat arbitrary, genes in the top 25% for two data types are all rice-diverged. If the list we have generated proves to be valuable for identifying genes centrally involved in above ground cell wall synthesis, relaxing these criteria may continue to allow us to identify good targets for study.

[0165] As listed in Table 3, this analysis identified 33 GT loci, representing 45 gene models, as rice-diverged and rice-diverged. GTs from 14 families are represented. Thirty-six of the gene models (80%) have FL-cDNA support and all of the others have EST support. A number of GTs on this list are not expected to have direct roles in cell wall synthesis, including GT1s, which glycosylate small molecule acceptors; GT4s, which include sucrose synthases; GT20s, which act on trehalose; and the GT29 and GT31 genes, which have not been characterized in plants though similar enzymes in animals are involved in protein glycosylation. All of the remaining GTs are from families that have either been shown to be involved in cell wall synthesis, including the members of the GT2, GT8, GT37, GT43, GT48, and GT77 families, or have been implicated or hypothesized to be involved in cell wall synthesis, including the members of the GT47, GT61, and GT75 families. References that elucidate the connections or putative connections of these proteins with cell wall synthesis are provided. Of particular relevance to type II cell wall synthesis, the list includes two members of the Cs1F gene family (GT2), which is involved in mixed linkage glucan synthesis (Burton et al., 2006). Furthermore, the families of a number of listed genes have been connected with xylan synthesis, including the members of the GT8, GT43, GT47, GT61 families. The GT77 family has been shown to be involved with accumulation of arabinan in type I walls (Egelund et al., 2007), but it may also be relevant to glucuronoarabinan synthesis in type II cell walls. In summary, we expect a number of the rice-divereged, rice-diverged GTs to play important roles in the synthesis of Type II specific cell wall in vegetative, above-ground tissues, distinguishing these genes among the hundreds of rice GTs as prime targets for functional studies in grasses.

TABLE 3
List of rice-diverged GTs with high expression in vegetative, above ground tissues.

| | CAZy | | |
|---|---|---|---|
| TIGR ID | Family | TIGR Annotation | Cell Wall Reference |
| Os01g53350 | GT1 | anthocyanidin 5,3-O-glucosyltransferase, putative, | |
| | | expressed | |
| Os02g11110 | GT1 | flavonol-3-O-glycoside-7-O-glucosyltransferase 1, | |
| | | putative, expressed | |
| Os02g11640 | GT1 | flavonol-3-O-glycoside-7-O-glucosyltransferase 1, | |
| | | putative, expressed | |
| Os02g28900 | GT1 | cytokinin-O-glucosyltransferase 2, putative, expressed | |
| Os04g25440 | GT1 | cytokinin-O-glucosyltransferase 2, putative, expressed | |
| Os11g04860 | GT1 | indole-3-acetate beta-glucosyltransferase, putative, | |
| | | expressed | |
| Os02g49332 | GT2 | CslE2 - cellulose synthase-like family E, expressed | (Hazen et al., 2002) |
| Os07g36630 | GT2 | CslF8 - cellulose synthase-like family F; beta1,3; 1,4 | (Burton et al., 2006) |
| | | glucan synthase, expressed | |
| Os08g06380 | GT2 | CslF6 - cellulose synthase-like family F; beta1,3; 1,4 | (Burton et al., 2006) |
| | | glucan synthase, expressed | |
| Os02g51060 | GT2 | CslA6 - cellulose synthase-like family A; mannan | (Liepman et al., 2007) |
| | | synthase, expressed | |
| Os03g15840 | GT4 | glycosyl transferase, group 1 family protein, putative, | |
| | | expressed | |
| Os03g16140 | GT4 | digalactosyldiacylglycerol synthase 2, putative, | |
| | | expressed | |
| Os11g05990 | GT4 | digalactosyldiacylglycerol synthase 1, putative, | |
| | | expressed | |
| Os03g11330 | GT8 | transferase, transferring glycosyl groups, putative, | (Lee et al., 2007b) |
| | | expressed | |
| Os05g35200 | GT8 | secondary cell wall-related glycosyltransferase family 8, | (Lee et al., 2007b) |
| | | putative, expressed | |
| Os06g12280 | GT8 | glycosyl transferase family 8 protein, expressed | (Lee et al., 2007b) |
| Os02g54820 | GT20 | trehalose-6-phosphate synthase, putative, expressed | |
| Os05g44210 | GT20 | alpha,alpha-trehalose-phosphate synthase, putative, | |
| | | expressed | |
| Os08g34580 | GT20 | trehalose-6-phosphate synthase, putative, expressed | |
| Os12g05550 | GT29 | sialyltransferase-like protein, putative, expressed | |
| Os08g02370 | GT31 | transferase, transferring glycosyl groups, putative, | |
| | | expressed | |
| Os02g52560 | GT37 | galactoside 2-alpha-L-fucosyltransferase, putative, | (Perrin et al., 1999) |
| | | expressed | |
| Os07g49370 | GT43 | beta3-glucuronyltransferase, putative, expressed | (Lee et al., 2007a; |
| | | | Pena et al., 2007) |
| Os01g70190 | GT47 | secondary cell wall-related glycosyltransferase family | (Mitchell et al., 2007) |
| | | 47, putative, expressed | |
| Os04g57510 | GT47 | exostosin-like, putative, expressed | (Mitchell et al., 2007) |
| Os02g58560 | GT48 | CALS1, putative, expressed | (Hong et al., 2001) |
| Os06g02260 | GT48 | callose synthase catalytic subunit, putative, expressed | (Hong et al., 2001) |
| Os02g22380 | GT61 | glycosyltransferase, putative, expressed | (Mitchell et al., 2007) |
| Os06g27560 | GT61 | HGA4, putative, expressed | (Mitchell et al., 2007) |
| Os06g28124 | GT61 | glycosyltransferase, putative, expressed | (Mitchell et al., 2007) |
| Os03g40270 | GT75 | alpha-1,4-glucan-protein synthase, putative, expressed | (Drakakaki et al., 2006) |
| Os03g63270 | GT77 | regulatory protein, putative, expressed | (Egelund et al., 2007; |
| | | | Egelund et al., 2006) |
| Os07g19444 | GT77 | regulatory protein, putative, expressed | (Egelund et al., 2007; |
| | | | Egelund et al., 2006) |

[0166] Mutant Line Resources to Study Functions of GTs. Gene indexed mutant rice plants interrupting or activating expression of GTs may in many cases serve as useful resources for determining the gene functions. Several approaches have been undertaken to develop rice mutant lines in which genes are randomly tagged by DNA insertion elements, such as the Tos17 retrotransposition and T-DNA insertion (An et al., 2003; Miyao et al., 2003). For rice GTs, we gathered mutant line information from available mutant line libraries (Table 4). Among these mutant libraries, NIAS Tos17, OTL Tos17 and T-DNA, and RMD T-DNA mutant lines have phenotype information available in their database website, and the hyperlinks to these phenotypes are also available in the Rice GT Database. Information about phenotypes in GTs gene indexed mutant lines, available from above public databases, suggest candidate GT genes associated with rice cell wall biosynthesis. For example, the rice GT Os01g54620.1 (CESA4, a expressed cellulose synthase gene) in GT2 has a Tos17 knockout line NE1042 in the NIAS library, showing a brittle, withering and dwarf phenotype. The homozygous mutant plant progeny of AT4G18780.1 (CESA8), the Arabidopsis ortholog of this rice GT, were severely dwarfed and sterile (Persson et al., 2007). The leaves were dark green, indicating an increase in chloroplasts per leaf area of the mutants, which was probably due to the reduced cell size (Persson et al., 2007). These phenotypes suggest a role for the rice GT, Os01g54620.1, in cell wall biosynthesis. Thus the availability of mutant lines and the corresponding phenotype information for some of these lines in our database will be helpful for the further functional approaches of rice GTs.

TABLE 4
Summary information for rice GT mutant lines.

| | No. of GTs with | No. of |
|---|---|---|
| Mutant Library | Mutant Lines | Mutant Lines |
| NIAS Tos17* | 75 | 276 |
| OTL Tos17* | 71 | 190 |
| UCD Ds | 67 | 124 |
| RMD T-DNA* | 157 | 196 |
| TRIM T-DNA | 108 | 118 |
| OTL T-DNA* | 141 | 122 |
| Postech T-DNA | 533 | 991 |
| Postech AC | 429 | 954 |

*The phenotypic information of these indicated libraries is available for the mutant lines on the library website. Hyperlinks are also provided in the Rice GT Database

[0167] In this study we identified 609 rice GT genes, representing 769 gene models, and created the Rice GT Database to provide a logical format to host and analyze diverse sets of functional genomic information in a phylogenetic context. Rather than analyzing rice GTs one by one, this database allows simultaneous visualization of all the rice GTs families and subfamilies. This format allows for comparison of the features of rice GTs between and within different families. Using this database we identified 33 rice-diverged GT genes with high expression in vegetative, above-ground tissues. We hypothesize that many of these GTs will have important roles in the biosynthesis of grass-specific cell wall components and thus are prime candidates for further functional analysis. We plan to update this database semiannually and add additional features to the database including: links to PubMed citations, protein-protein interaction data from experimental determination or computational prediction, new mutant lines and corresponding phenotype information for both GTs and their interacting proteins, MPSS data from new libraries, and new microarray expression data. We anticipate this database will provide a useful service to the plant cell wall researchers and accelerate biofuel research.

[0168] While the present invention has been described with reference to the specific embodiments thereof, it should be understood by those skilled in the art that various changes may be made and equivalents may be substituted without departing from the true spirit and scope of the invention. In addition, many modifications may be made to adapt a particular situation, material, composition of matter, process, process step or steps, to the objective, spirit and scope of the present invention. All such modifications are intended to be within the scope of the claims appended hereto.

What is claimed is:

1. A cell comprising a modified or altered enzymatic activity of a rice-diverged glycosyltransferase (GT).

2. The cell of claim 1 wherein the rice-diverged GT comprises an amino acid sequence that comprises an equal to or more than 80% sequence similarity with an amino acid sequence chosen from the group consisting of SEQ ID NOs:1-269.

3. The cell of claim 2 wherein the rice-diverged GT comprises an amino acid sequence that comprises an equal to or more than 90% sequence similarity with an amino acid sequence chosen from the group consisting of SEQ ID NOs:1-269.

4. The cell of claim 3 wherein the rice-diverged GT comprises an amino acid sequence that comprises an equal to or more than 95% sequence similarity with an amino acid sequence chosen from the group consisting of SEQ ID NOs:1-269.

5. The cell of claim 4 wherein the rice-diverged GT comprises an amino acid sequence that comprises an equal to or more than 99% sequence similarity with an amino acid sequence chosen from the group consisting of SEQ ID NOs:1-269.

6. The cell of claim 2 wherein the rice-diverged GT comprises an amino acid sequence that comprises an equal to or more than 80% sequence similarity with an amino acid sequence chosen from the group consisting of SEQ ID NOs:1-30.

7. The cell of claim 6 wherein the rice-diverged GT comprises an amino acid sequence that comprises an equal to or more than 90% sequence similarity with an amino acid sequence chosen from the group consisting of SEQ ID NOs:1-30.

8. The cell of claim 7 wherein the rice-diverged GT comprises an amino acid sequence that comprises an equal to or more than 95% sequence similarity with an amino acid sequence chosen from the group consisting of SEQ ID NOs:1-30.

9. The cell of claim 8 wherein the rice-diverged GT comprises an amino acid sequence that comprises an equal to or more than 99% sequence similarity with an amino acid sequence chosen from the group consisting of SEQ ID NOs:1-30.

10. The cell of claim 1 wherein the rice-diverged GT is highly expressed in the vegetative above ground plant tissue.

11. The cell of claim 1 wherein the expression of the rice-diverge GT is increased or reduced as compared to a wild-type cell.

12. The cell of claim 11 wherein the expression of the rice-diverge GT is reduced and the cell is knocked-out for the gene encoding the rice-diverge GT.

13. The cell of claim 1 wherein the cell is a plant cell.

14. The cell of claim 13 wherein the plant cell is a monocot plant cell.

15. The cell of claim 1, wherein the rice-diverged GT is involved in synthesis of cellulose or cell wall synthesis.

16. The cell of claim 15, wherein the rice-diverged GT is involved in synthesis of a type I wall-specific or enriched component.

17. The cell of claim 15, wherein the rice-diverged GT is involved in synthesis of a type II wall-specific or enriched component.

18. The cell of claim 15, wherein the rice-diverged GT is involved in synthesis of glucuronoarabinoxylan.

19. A method of identifying or determining a rice-diverged GT of a plant or cell, comprising: (a) providing the amino acid sequence of a monocot gene not known to be rice-diverged GT, and (b) identifying the gene as lacking a dicot ortholog.

20. The method of claim 19 further comprising: determining the expression level of the gene in vegetative above ground plant tissue.

21. The method of claim 20 further comprising: constructing a plant cell that is reduced or increased in the expression of the gene.

The application's sequence listing, which the Patent Office published only in electronic form, follows.

SEQUENCE LISTING (269 sequences)

SEQ ID NO: 1 - protein, 494 aa, Oryza sativa
MPTASPAHAVFFPYPVQGHVASALHLAKLLHARGGVRVTFVHSERNRRRVIRSHGEGALAAGAPGFCFAAVPDGLPSDDDDDGPSDPRDLLFSIGACVPHLKKILDEAAASGAPATCVVSDVDHVLLAAREMGLPAVAFWTTSACGLMAFLQCKELIDRGIIPLKDAEKLSNGYLDSTVVDWVPGMPADMRLRDFFSFVRTTDTDDPVLAFVVSTMECLRTATSAVILNTFDALEGEVVAAMSRILPPIYTVGPLPQLTAASHVVASGADPPDTPALSAASLCPEDGGCLEWLGRKRPCSVLYVNFGSIVYLTSTQLVELAWGLADSGHDFLWVIRDDQAKVTGGDGPTGVLPAEFVEKTKGKGYLTSWCPQEAVLRHDAIGAFLTHCGWNSVLEGISNGVPMLCYPMAADQQTNCRYACTEWRVGVEVGDDIEREEVARMVREVMEEEIKGKEVRQRATEWKERAAMAVVPSGTSWVNLDRMVNEVFSPGNNM

SEQ ID NO: 2 - protein, 497 aa, Oryza sativa
MGSLPAAAEARPHAVMVPYPAQGHVTPMLTLAKLLYSRGFHVTFVNNEFNHRRLLRARGARALDGAPGFRFAAMDDGLPPSDADATQDVPALCHSVRTTWLPRFMSLLAKLDDEAAAAAAADGAARRVTCVVADSNMAFGIHAARELGLRCATLWTASACGFMGYYHYKHLLDRGLFPLKSEADLSNGHLDTTVDWIPGMTGDLRLRDLPSFVRSTDRDDIMFNFFVHVTASMSLAEAVIINTFDELDAPSSPLMGAMAALLPPIYTVGPLHLAARSNVPADSPVAGVGSNLWKEQGEALRWLDGRPPRSVVYVNFGSITVMSAEHLAEFAWGLAGSGYAFLWNLRPDLVKGDGGAAPALPPEFAAATRERSMLTTWCPQAEVLEHEAVGVFLTHSGWNSTLESIAGGVPMVCWPFFAEQQTNCRYKRTEWGIGAEIPDDVRRGEVEALIREAMDGEKGREMRRRVAELRESAVAAAKPGGRSVHNIDRLIDEVLMA

SEQ ID NO: 3 - protein, 482 aa, Oryza sativa
MANAANQHTCDGPQPSAPTHFLIVAYGIQSHINPAQNLAHRLASIDASSVMCTLSIHASAHRRMFSSLIASPDEETTDGIISYVPFSDGFDDISKLSILSGDERARSRCTSFESLSAIVSQLAARGRPVTCIVCTMAMPPVLDVARKNGIPLVVFWNQPATVLAAYYHYYHGYRELFASHASDPSYEVVLPGMQPLCIRSLPSFLVDVTNDKLSSFVVEGFQELFEFMDREKPKVLVNTLNVLEAATLTAVQPYFQEVFTIGHLVAGSAKERIHMFQRDKKNYMEWLDTHSERSVVYISFGSILTYSKRQVDEILHGMQECEWPFLWVVRKDGREEDLSYLVDNIDDHHNGMVIEWCDQLDVLSHPSVGCFVTQCGWNSTLEALELGVPMVAVPNWSDQPTIAYLVEKEWMVGTRVYRNDEGVIVGTELAKSVKIVMGDNEVATKIRERVNSFKHKIHEEAIRGETGQRSLQIFAKTIIESD

SEQ ID NO: 4 - protein, 745 aa, Oryza sativa
MAGSGGGVVSGGRQRGPPLFATEKPGRMAMAAYRVSAATVFAGVLLIWLYRATHLPPGGGDGVRRWAWLGMLAAELWFGFYWVLTLSVRWCPVYRRTFKDRLAQSYSEDELPSVDIFVCTADPTAEPPMLVISTVLSVMAYDYLPEKLNIYLSDDAGSVLTFYVLCEASEFAKHWIPFCKKYKVEPRSPAAYFAKVASPPDGCGPKEWFTMKELYKDMTDRVNSVVNSGRIPEVPRCHSRGFSQWNENFTSSDHPSIVQILIDSNKQKAVDIDGNALPTLVYMAREKKPQKQHHFKAGSLNALIRVSSVISNSPIIMNVDCDMYSNNSESIRDALCFFLDEEQGQDIGFVQYPQNFENVVHNDIYGHPINVVNELDHPCLDGWGGMCYYGTGCFHRREALCGRIYSQEYKEDWTRVAGRTEDANELEEMGRSLVTCTYEHNTIWGIEKGVRYGCPLEDVTTGLQIQCRGWRSVYYNPKRKGFLGMTPTSLGQILVLYKRWTEGFLQISLSRYSPFLLGHGKIKLGLQMGYSVCGFWAVNSFPTLYYVTIPSLCFLNGISLFPEKTSPWFIPFAYVMVAAYSCSLAESLQCGDSAVEWWNAQRMWLIRRITSYLLATIDTFRRILGISESGFNLTVKVTDLQALERYKKGMMEFGSFSAMFVILTTVALLNLACMVLGISRVLLQEGPGGLETLFLQAVLCVLIVAINSPVYEALFLRRDKGSLPASVARVSICFVLPLCILSICK

SEQ ID NO: 5 - protein, 886 aa, Oryza sativa
MAANGGGGGAGGCSNGGGGGAVNGAAANGGGGGGGGSKGATTRRAKVSPMDRYWVPTDEKEMAAAVADGGEDGRRPLLFRTFTVRGILLHPYRLLTLVRLVAIVLFFIWRIRHPYADGMFFWWISVIGDFWFGVSWLLNQVAKLKPIRRVPDLNLLQQQFDLPDGNSNLPGLDVFINTVDPINEPMIYTMNAILSILAADYPVDKHACYLSDDGGSIIHYDGLLETAKFAALWVPFCRKHSIEPRAPESYFAVKSRPYAGSAPEDFLSDHRYMRREYDEFKVRLDALFTVIPKRSDAYNQAHAEEGVKATWMADGTEWPGTWIDPSENHKKGNHAGIVQVMLNHPSNQPQLGLPASTDSPVDFSNVDVRLPMLVYIAREKRPGYDHQKKAGAMNVQLRVSALLTNAPFIINFDGDHYVNNSKAFRAGICFMLDRREGDNTAFVQFPQRFDDVDPTDRYCNHNRVFFDATLLGLNGIQGPSYVGTGCMFRRVALYGVDPPRWRPDDGNIVDSSKKFGNLDSFISSIPIAANQERSIISPPALEESILQELSDAMACAYEDGTDWGKDVGWVYNIATEDVVTGFRLHRTGWRSMYCRMEPDAFRGTAPINLTERLYQILRWSGGSLEMFFSHNCPLLAGRRLNFMQRIAYINMTGYPVTSVFLLFYLLFPVIWIFRGIFYIQKPFPTYVLYLVIVIFMSEMIGMVEIKWAGLTLLDWIRNEQFYIIGATAVYPLAVLHIVLKCFGLKGVSFKLTAKQVASSTSEKFAELYDVQWAPLLFPTIVVIAVNICAIGAAIGKALFGGWSLMQMGDASLGLVFNVWILLLIYPFALGIMGRWSKRPYILFVLIVISFVIIALADIAIQAMRSGSVRLHFRRSGGANFPTSWGF

SEQ ID NO: 6 - protein, 952 aa, Oryza sativa
MAPAVAGGGGRRNNEGVNGNAAAPACVCGFPVCACAGAAAVASAASSADMDIVAAGQIGAVNDESWVAVDLSDSDDAPAAGDVQGALDDRPVFRTEKIKGVLLHPYRVLIFVRLIAFTLFVIWRIEHKNPDAMWLWVTSIAGEFWFGFSWLLDQLPKLNPINRVPDLAVLRRRFDHADGTSSLPGLDIFVTTADPIKEPILSTANSILSILAADYPVDRNTCYLSDDSGMLLTYEAMAEAAKFATLWVPFCRKHAIEPRGPESYFELKSHPYMGRAQEEFVNDRRRVRKEYDDFKARINGLEHDIKQRSDSYNAAAGVKDGEPRATWMADGSQWEGTWIEQSENHRKGDHAGIVLVLLNHPSHARQLGPPASADNPLDFSGVDVRLPMLVYVAREKRPGCNHQKKAGAMNALTRASAVLSNSPFILNLDCDHYINNSQALRAGICFMLGRDSDTVAFVQFPQRFEGVDPTDLYANHNRIFFDGTLRALDGLQGPIYVGTGCLFRRITLYGFEPPRINVGGPCFPRLGGMFAKNRYQKPGFEMTKPGAKPVAPPPAATVAKGKHGFLPMPKKAYGKSDAFADTIPRASHPSPYAAEAAVAADEAAIAEAVMVTAAAYEKKTGWGSDIGWVYGTVTEDVVTGYRMHIKGWRSRYCSIYPHAFIGTAPINLTERLFQVLRWSTGSLEIFFSRNNPLFGSTFLHPLQRVAYINITTYPFTALFLIFYTTVPALSFVTGHFIVQRPTTMFYVYLAIVLGTLLILAVLEVKWAGVTVFEWFRNGQFWMTASCSAYLAAVLQVVTKVVFRRDISFKLTSKLPAGDEKKDPYADLYVVRWTWLMITPIIIILVNIIGSAVAFAKVLDGEWTHWLKVAGGVFFNFWVLFHLYPFAKGILGKHGKTPVVVLVWWAFTFVITAVLYINIPHIHGPGRHGAASPSHGHHSAHGTKKYDFTYAWP

SEQ ID NO: 7 - protein, 534 aa, Oryza sativa
MQGDLALRAGGDRLLVADTVAAVVESLVQAWRQVRMELLVPLLRGAVVACMVMSVIVLAEKVFLGVVSAVVKLLRRRPARLYRCDPVVVEDDDEAGRASFPMVLVQIPMYNEKEVYQLSIGAACRLTWPADRLIVQVLDDSTDAIVKELVRKECERWGKKGINVKYETRKDRAGYKAGNLREGMRRGYVQGCEFVAMLDADFQPPPDFLLKTVPFLVHNPRLALVQTRWEFVNANDCLLTRMQEMSMDYHFKVEQEAGSSLCNFFGYNGTAGVWRRQVIDESGGWEDRTTAEDMDLALRAGLLGWEFVYVGSIKVKSELPSTLKAYRSQQHRWSCGPALLFKKMFWEILAAKKVSFWKKLYMTYDFFIARRIISTFFTFFFFSVLLPMKVFFPEVQIPLWELILIPTAIILLHSVGTPRSIHLIILWFLFENVMALHRLKATLIGFFEAGRANEWIVTQKLGNIQKLKSIVRVTKNCRFKDRFHCLELFIGGFLLTSACYDYLYRDDIFYIFLLSQSIIYFAIGFEFMGVSVSS

SEQ ID NO: 8 - protein, 415 aa, Oryza sativa
MGQQAAEAQPLLLQGDQVDAEWGCRPHRIVLFVEPSPFAYISGYKNRFQNFIKHLREMGDEMLVVTTHKGAPEEFHGAKVIGSWSFPCPLYQNVPLSLALSPRIFSAVAKFKPDIIHATSPGVMVFGARFIAKMLSVPMVMSYHTHLPAYIPRYNLNWLLGPTWSLIRCLHRSADLTLVPSVAIAEDFETAKVVSANRVRLWNKGVDSESFHPKFRKHEMRIKLSGGEPEKPLIIHVGRFGREKNLDFLKRVMERLPGVRIAFVGDGPYRAELERMFTGMPAVFTGMLQGEELSQAYASGDLFAMPSESETLGQVVLESMASGVPVVAARAGGIPDIIPKDKEGKTSFLFTPGDLDECVRKIEQLLSSKVLRESIGRAAREEMEKCDWRAASKTIRNEHYCTATLYWRKKMGRTN

SEQ ID NO: 9 - protein, 463 aa, Oryza sativa
MARKQHIAIFTTASLPWMTGTAVNPLFRAAYLAKAGDWEVTLVVPWLSKGDQLLVYPNKMKFSVPGEQEGYVRRWLEERIGLLPKFEIKFYPGKFSTEKRSILPAGDITQTVSDDKADIAVLEEPEHLTWYHHGRRWKNKFRKVIGVVHTNYLEYVKRERNGYIHAFLLKHINSWVTDIYCHKVIRLSAATQEVPRSIVCNVHGVNPKFIEIGKLKHQQISQREQAFFKGAYYIGKMVWSKGYTELLQLLQKHQKELSGLKMELYGSGEDSDEVKASAEKLNLDVRVYPGRDHGDSIFHDYKVFINPSTTDVVCTTTAEALAMGKIVICANHPSNEFFKRFPNCHMYNTEKEFVRLTMKALAEEPIPLSEELRHELSWEAATERFVRVADIAPIMSIKQHSPSPQYFMYISPDELKKNMEEASAFFHNAISGFETARCVFGAIPNTLQPDEQQCKELGWRLQE

SEQ ID NO: 10 - protein, 736 aa, Oryza sativa
MASYGVDTRPAAAAAGGGGAGAGAAGEGALSFLSRGLREDLRLIRARAGELETFLTAPVPEPELLARLRRAYSSSAGTTRLDLSAIGKAFGTGVVGRGSRGARWGWEEVQEAEEWEPIRMVKARLREMERRRQWQATDMLHKVKLSLKSMSFVPEASEEVPPLDLGELLAYFLKQSGPLFDQLGIKRDVCDKLVESLCSKRKDHLAYNSFPASEPSAFSNDNAGDELDLRIASVVQSTGHNYEGGFWNDGHKYETADKRHVAIVTTASLPWMTGTAVNPLFRAAYLAKSSKQDVTLVVPWLCKSDQELVYPNSMTFSSPQEQEAYMRSWLEERVGFKTDFKISFYPGKFQKERRSIIPAGDTSQFIPSKEADIAILEEPEHLNWYHHGKRWTDKFNHVVGVVHTNYLEYIKREKNGVIQAFFVKHINNLVARAYCHKVLRLSGATQDLPKSMICNVHGVNPKFLEVGERIAAERESGQHSFSKGAYFLGKMVWAKGYRELIDLYAKHKSDLEGIKLDIYGNGEDSHEVQSAAMKLNLNLNFHKGRDHADDSLHGYKVFINPSISDVLCTATAEALAMGKFVVCADHPSNDFFRSFPNCLTYKTSEDFVAKVKEAMARDPQPLTPEQRYNLSWEAATQRFMEHSELDKVLSSSNRDCTTSTSGCGKSGDNKMEKSASLPNMSDMVDGGLAFAHYCFTGNELLRLSTGAIPGTLNYNKQHSLDLHLLPPQVQNPVYGW

SEQ ID NO: 11 - protein, 577 aa, Oryza sativa
MQLRISPSMRSITISSSNGVVDSMKVRVAPQPPPPPPPLALQGVVTPGAGRRGGGGGGGGGGGGWWGAGWYWRAVAFPAVVALGCLLPFAFILAAVPALEADGSKCSSIDCLGRRIGPSFLGRQGGDSMRLVQDLYRIFDQVNNEESPDDKRIPESFRDFLLEMKDSHYDARTFAVRLKATMENMDKEVKKLRLAEQLYKHYAATAIPKGIHCLSLRLTDEYSSNAHARKQLPPPELLPLLSDNSFQHYILASDNILAASVVVSSTVRSSSVPHKVVFHVITDKKTYPGMHSWFALNSISPAIVEVKGVHQFDWLTRENVPVLEAIENHRGVRNHYHGDHAAVSSASDSPRVLASKLQARSPKYISLLNHLRIYLPELFPNLNKVVFLDDDIVIQRDLSPLWKINLEGKVNGAVETCRGEDNWVMSKRFRTYFNFSHPVIARSLDPDECAWAYGMNIFDLAAWRKTNIRETYHFWLKENLKSGLTLWKFGTLPPALIAFRGHLHGIDPSWHMLGLGYQENTDIEGVRRSAVIHYNGQCKPWLDIAFKNLQPFWTKHVNYSNDFIRNCHILEPQYDKE

SEQ ID NO: 12 - protein, 627 aa, Oryza sativa
MGSLETRYRPAGAPSDDTTKRRTPKSRIYKDVENFGVLVLEKNSGCKFKTLRYLLLAITSATFLTLLTPTFYEHQLQSSRYVDVGWIWDKPSYDPRYVSSVDVQWEDVYKALENLNDGSQKLKVGLLNFNSTEYGSWAQLLPGSAVSIVRLEHAKDSITWDTLYPEWIDEEEETDIPACPSLPDPNVRKGSHFDVIAVKLPCTRVGGWSRDVARLHLQLSAAKLAVASSKGNQKVHVLFVTDCFPIPNLFPCKNLVKHEGNAWLYSPDLKALREKLRLPVGSCELAVPLKAKARLYSVDRRREAYATILHSASEYVCGAISAAQSIRQAGSTRDLVILVDDTISDHHRKGLEAAGWKVRVIQRIRNPKAERDAYNEWNYSKFRLWQLTDYDKIIFIDADLLILRNVDFLFAMPEITATGNNATLFNSGVMVIEPSNCTFQLLMDHINEITSYNGGDQGYLNEIFTWWHRIPKHMNFLKHFWEGDDDSAKAKKTELFGADPPILYVLHYLGMKPWLCFRDYDCNWNIPLMREFASDVAHARWWKVHDNMPEKLQSYCLLRSKLKAGLEWERRQAEKANLEDGHWRRNITDPRLTICYEKFCYWESMLLHWGEKNPTNNNPVPATISSS

SEQ ID NO: 13 - protein, 504 aa, Oryza sativa
MAGGRAFRPSAPRRAAFAALLTLLLLATLSFLLSSPPPTHASHRSSYLGASPPSRLAAIRRHAADHAAVLAAYAAHARRLKEASAAQSLSFATMSSDLSALSSRLASHLSLPEDAVKPLEKEARDRIKLARLLAADAKEGFDTQSKIQKLSDTVFAVGEHLARARRAGRMSSRIAAGSTPKSLHCLAMRLLEARLAKPSAFADDPDPSPEFDDPSLYHYAVFSDNVLAVSVVVASAARAAADPSRHVFHVVTAPMYLPAFRVWFARRPPPLGVHVQLLAYSDFPFLNETSSPVLRQIEAGKRDVALLDYLRFYLPDMFPALQRVVLLEDDVVVQKDLAGLWHLDLDGKVNGAVEMCFGGFRRYSKYLNFTQAIVQERFDPGACAWAYGVNVYDLEAWRRDGCTELFHQYMEMNEDGVLWDPTSVLPAGLMTFYGNTKPLDKSWHVMGLGYNPSISPEVIAGAAVIHFNGNMKPWLDVALNQYKALWTKYVDTEMEFLTLCNFGL

SEQ ID NO: 14 - protein, 750 aa, Oryza sativa
MPSLSCHNLLDLVAAADDAAPSPASLRLPRVMSAASPASPTSPSTPAPARRVVVSHRLPLRAAADAASPFGFSFTVDSDAVAYQLRSGLPPGAPVLHIGTLPPPATEAASDELCNYLLANFSCLPVYLPADLHRRFYHGFCKHYLWPLLHYLLPLTPSSLGGLPFDRALYHSFLSANRAFADRLTEVLSPDDDLVWIHDYHLLALPTFLRKRFPRAKVGFFLHSPFPSSEIFRTIPVREDLLRALLNADLVGFHTFDYARHFLSACSRLLGLDYQSKRGYIGIEYYGRTVTVKILPVGIDMGQLRSVVSAPETGDLVRRLTESYKGRRLMVGVDDVDLFKGIGLKFLAMEQLLVEHPELRGRAVLVQIANPARSEGRDIQEVQGEARAISARVNARFGTPGYTPIVLIDRGVSVHEKAAYYAAAECCVVSAVRDGLNRIPYIYTVCRQESTGLDDAAKRSVIVLSEFVGCSPSLSGAIRVNPWSVESMAEAMNAALRMPEPEQRLRHEKHYKYVSTHDVAYWAKSFDQDLQRACKDHFSRRHWGIGFGMSFKVVALGPNFRRLSVDHIVPSYRKSDNRLILLDYDGTVMPEGSIDKAPSNEVISVLNRLCEDPKNRVFIVSGRGKDELGRWFAPCEKLGIAAEHGYFTRWSRDSAWETCGLAVDFDWKKTAEPVMRLYKEATDGSTIEDKESALVWHHDEADPDFGSCQAKELLDHLENVLANEPVVVKRGQHIVEVNPQVSACHLPSFL

SEQ ID NO: 15 - protein, 859 aa, Oryza sativa
MPTPAPSASSSSSSCGGGGGGAGAASSYSSSPDDRMLRGECGRRHPFASSAAVGAGSPDAMDTDSAEPSSAATSVADFGARSPFSPGAASPANMDDAGGASAAGHAARPPLAGPRSGFRRLGLRGMKQRLLVVANRLPVSANRRGEDQWSLEISAGGLVSALLGVKDVDAKWIGWAGVNVPDEVGQRALTRALAEKRCIPVFLDEEIVHQYYNGYCNNILWPLFHYLGLPQEDRLATTRNFESQFNAYKRANQMFADVVYQHYKEGDVIWCHDYHLMFLPKCLKDHDINMKVGWFLHTPFPSSEIYRTLPSRSELLRSVLCADLVGFHTYDYARHFVSACTRILGLEGTPEGVEDQGRLTRVAAFPIGIDSERFKRALELPAVKRHITELTQRFDGRKVMLGVDRLDMIKGIPQKILAFEKFLEENHEWNDKVVLLQIAVPTRTDVPEYQKLTSQVHEIVGRINGRFGTLTAVPIHHLDRSLDFHALCALYAVTDVALVTSLRDGMNLVSYEYVACQGSKKGVLILSEFAGAAQSLGAGAILVNPWNITEVADSIKHALTMSSDEREKRHRHNYAHVTTHTAQDWAETFVCELNETVAEAQLRTRQVPPDLPSQAAIQQYLHSKNRLLILGFNSTLTEPVESSGRRGGDQIKEMELKLHPELKGPLRALCEDEHTTVIVLSGSDRSVLDENFGEFNMWLAAEHGMFLRPTNGEWMTTMPEHLNMDWVDSVKNVFEYFTERTPRSHFEHRETSFVWNYKYADVEFGRLQARDMLQHLWTGPISNAAVDVVQGSRSVEVRSVGVTKGAAIDRILGEIVHSKSMITPIDYVLCIGHFLGKVIMQLIYMCISVSFSARCFFCL

SEQ ID NO: 16 - protein, 824 aa, Oryza sativa
MPSLPNSGDEGGAPPPTPPPPGARRVVVAHRLPLRADPNPGAPHGFDFSLDPHALPLQLSHGVPRPVVFVGVLPSAVAEAVQASDELAADLLARFSCYLVFLPAKLHADFYDGFCKHYMWPHLHYLLPLAPSYGRGGGLPFNGDLYRAFLTVNTHFAERVFELLNPDEDLVFVHDYHLWAFPTFLRHKSPRARIGFFLHSPFPSSELFRAIPVREDLLRALLNADLVGFHTFDYARHFLSACSRVLGLSNRSRRGYIGIEYFGRTVVVKILSVGIDMGQLRAVLPLPETVAKANEIADKYRGRQLMLGVDDMDLFKGIGLKLLAMERLLESRADLRGQVVLVQINNPARSLGRDVDEVRAEVLAIRDRINARFGWAGYEPVVVIDGAMPMHDKVAFYTSADICIVNAVRDGLNRIPYFYTVCRQEGPVPTAPAGKPRQSAIIVSEFVGCSPSLSGAIRVNPWNVDDVADAMNTALRMSDGEKQLRQEKHYRYVSTHDVVYWAQSFDQDLQKACKDNSSMVILNFGLGMGFRVVALGPSFKKLSPELIDQAYRQTGNRLILLDYDGTVMPQGLINKAPSEEVIRTLNELCSDPMNTVFVVSGRGKDELAEWFAPCDEKLGISAEHGYFTRWSRDSPWESCKLVTHFNWKNIAGPVMKHYSDATDGSYIEVKETSLVWHYEEADPDFGSCQAKELQDHLQNVLANEPVFVKSGHQIVEVNPQGVGKGVAVRNLISTMGNRGSLPDFILCVGDDRSDEDMFEAMISPSPAFPETAQIFPCTVGNKPSLAKYYLDDPADVVKMLQGLTDSPTQQQPRPPVSFENSLDD

SEQ ID NO: 17 - protein, 396 aa, Oryza sativa
MKRRHLPPVLVLLLLSILSLSFRRRLLVLQGPPSSSSSSRHPVGDPLLRRLAADDGAGSSQILAEAAALFANASISTFPSLGNHHRLLYLRMPYAFSPRAPPRPKTVARLRVPVDALPPDGKLLASFRASLGSFLAGRRRRGRGGNVAGVMRDLAGVLGRRYRTCAVVGNSGVLLGSGRGPQIDAHDLVIRLNNARVAGFAADVGVKTSLSFVNSNILHICAARNAITRAACGCHPYGGEVPMAMYVCQPAHLLDALICNATATPSSPFPLLVTDARLDALCARIAKYYSLRRFVSATGEPAANWTRRHDERYFHYSSGMQAVVMALGVCDEVSLFGFGKSPGAKHHYHTNQKKELDLHDYEAEYDFYGDLQARPAAVPFLDDAHGFTVPPVRLHW

SEQ ID NO: 18 - protein, 388 aa, Oryza sativa
MFAPAAAARPHKQAPLARVPTRLVAALCTACFFLGVCVVNRYWAVPELPDCRTKVNSDNPGAVMNQVSQTREVIIALDRTISEIEMRLAAARTMQARSQGLSPSDSGSDQGSTRARLFFVMGIVTTFANRKRRDSIRQTWLPQGEHLQRLEKEKGVVIRFVIGRSANPSPDSEVERAIAAEDKEYNDILRLDHVERNGSLPLKIQMFLSTALSIWDADFYVKVDDDVHVNIGITRSILARHRSKPRVYIGCMKSGPVVDKNESKYYEPDHWKFGTEGNNYFRHATRQLYAVTRDLATYISANRHILHKYSNEDVSFGSWLIGLDVEHVDERSLCCGTPPDCEWKAQAGNPCAASFDWNCTGICNPVERMEEVHRRCWEGHVADLQAQF

SEQ ID NO: 19 - protein, 575 aa, Oryza sativa
MDVKRARSPRAPGVDADDDKKRAAEWRGAVRPHMVLVGFLITLPVLVFVFGGRWGSFQTTSAPNVGGRHVVPGGVTTTQKNEAPKNVSVPATATKSLPQPQDKLLGGLLSAAFEESSCQSRYKSSLYRKKSPFPLSPYLVQKLRKYEAYHKKCGPGTKRYRKAIEQLKAGRNADNAECKYVVWFPCNGLGNRMLTIASTFLYALISNRVLLMHVAAEQEGLFCEPFPGSSWVLPGDFPHNNPQGLHIGAPESYVNMLKNNVVRNDDPGSVSASSLPPYVYLHVEQFRLKLSDNIFCDEDQLILNKFNWMILKSDSYFAPALFMTPMYEKELEKMFPQKESVFHHLGRYLFHPTNKVWGIVSRYYEAYLARVDEKIGFQIRIFPEKPIKFENMYDQLTRCIREQRLLPELGTAEPANTTAEAGKVKAVLIASLYSGYYEKIRGMYYENPTKTGEIVAVYQPSHEEQQQYTSNEHNQKALAEIYLLSYCDKIAMSAWSTFGYVAYSFAGVKPWILLRPDWDKERSEVACVRSTSVEPCLHSPPILSCRAKKEVDAATVKPYVRHCEDVGFGLKLFDS

SEQ ID NO: 20 - protein, 338 aa, Oryza sativa
MASAGGCKKKTGNSRSRSPRSPVVLRRAMLHSSLCFLVGLLAGLAAPSDWPAAAGAAVFLRTLRASNVIFSRSSNRPQQPQLVVVVTTTEQSDDSERRAAGLTRTAHALRLVSPPLLWLVVEEAPAEKHAAPPTARLLRRTGVVHRHLLMKQGDDDFSMQISMRREQQRNVALRHIEDHRIAGVVLFGGLADIYDLRLLHHLRDIRTFGAWPVATVSAYERKVMVQGPLCINTSSSSVITRGWFDMDMDMAAGGERRAAADRPPPETLMEVGGFAFSSWMLWDPHRWDRFPLSDPDASQESVKFVQRVAVEEYNQSTTRGMPDSDCSQIMLWRIQTTL

SEQ ID NO: 21 - protein, 415 aa, Oryza sativa
MAMRLSSAAVALALLLAATALEDVARGQDTERIEGSAGDVLEDDPVGRLKVYVYELPTKYNKKMVAKDSRCLSHMFAAEIFMHRFLLSSAIRTLNPEEADWFYTPVYTTCDLTPWGHPLPFKSPRIMRSAIQFISSHWPYWNRTDGADHFFVVPHDFGACFHYQEEKAIERGILPLLRRATLVQTFGQKDHVCLKEGSITIPPYAPPQKMKTHLVPPETPRSIFVYFRGLFYDTANDPEGGYYARGARASVWENFKNNPLFDISTDHPPTYYEDMQRSIFCLCPLGWAPWSPRLVEAVVFGCIPVIIADDIVLPFADAIPWDEIGVFVAEDDVPKLDTILTSIPMDVILRKQRLLANPSMKQAMLFPQPAQPGDAFHQILNGLGRKLPHPKSVYLDPGQKVLNWTQGPVGDLKPW

SEQ ID NO: 22 - protein, 264 aa, Oryza sativa
MWHVRKEIAPAILLVVDFGGWYKLDSNSASSNVSHMIQHTQVSLLKDVIVPYTHLLPTMHLSENKDRPTLLYFKGAKHRHRGGLVREKLWDLMVNEPDVVMEEGYPNATGREQSIKGMRTSEFCLHPAGDTPTSCRLFDAVASLCIPVIVSDEIELPFEGMIDYTEFAIFVSVNNSMRPKWLTNYLRNVPRQQKDEFRRNMAHVQPIFEYDSIYPGRMASAAQDGAVNHIWKKIHQKLPMIQEAVTREKRKPDGTSIPLRCHCT

SEQ ID NO: 23 - protein, 138 aa, Oryza sativa
MDVPTNLDARRRISFFANSLFMDMPSAPKVRHMLPFSVLTPYYKEDVLFSSQALEDQNEDGVSILFYLQKIYPDEWKHFLQRVDCNTEEELRETEQLEDELRLWASYRGQTLTRTAVALPYSQRDDVLQTSFGASGFS

SEQ ID NO: 24 - protein, 436 aa, Oryza sativa
MLTFFFTTVGYYVCTMMTVLTVYIFLYGRVYLALSGLDYEISRQFRFLGNTALDAALNAQFLVQIGIFTAVPMIMGFILELGLLKAIFSFITMQLQFCSVFFTFSLGTRTHYFGRTILHGGAKYHATGRGFVVRHIKFAENYRLYSRSHFVKALEVALLLIIYIAYGYTRGGSSSFILLTISSWFLVVSWLFAPYIFNPSGFEWQKTVEDFDDWTNWLLYKGGVGVKGENSWESWWDEEQAHIQTLRGRILETILSLRFLIFQYGIVYKLKIASHNTSLAVYGFSWIVLLVLVLLFKLFTATPKKSTALPTFVRFLQGLLAIGMIAGIALLIALTKFTIADLFASALAFVATGWCVLCLAVTWKRLVKFVGLWDSVREIARMYDAGMGALIFVPIVFFSWFPFVSTFQSRFLFNQAFSRGLEISLILAGNKANQEA

SEQ ID NO: 25 - protein, 566 aa, Oryza sativa
MTSTAYSRPSKLPGGGNGSDRRLPPRLMRGLTTKIEPKKLGVGLLAGCCLALLTYVSLAKLFAIYSPVFASTANTSALMQNSPPSSPETGPIPPQETAAGAGNNDSTVDPVDLPEDKSLVEAQPQEPGFPSAESQEPGLPAALSRKEDDAERAAAAAASEIKQSEKKNGVAAGGDTKIKCDENGVDEGFPYARPSVCELYGDVRVSPKQKTIYVVNPSGAGGFDENGEKRLRPYARKDDFLLPGVVEVTIKSVPSEAAAPKCTKQHAVPAVVFSVAGYTDNFFHDMTDAMIPLFLTTAHLKGEVQILITNYKPWWVQKYTPLLRKLSNYDVINFDEDAGVHCFPQGYLGLYRDRDLIISPHPTRNPRNYTMVDYNRFLRDALELRRDRPSVLGEEPGMRPRMLIISRAGTRKLLNLEEVAAAATELGFNVTVAEAGADVPAFAALVNSADVLLAVHGAGLTNQIFLPAEAVVVQIVPWGNMDWMATNFYGQPARDMQLRYVEYYVGEEETSLKHNYSRDHMVFKDPKALHAQGWQTLAATIMKQDVEVNLTRFRPILLQALDRLQQ

SEQ ID NO: 26 - protein, 524 aa, Oryza sativa
MSSTAYTRPSKPPGPAGERRPPRLAKELGRIEPKKLGIGLVAGCCLALLTYISFARLFAIYSPVFESTSLVMKNAPPASTQQNPVLAQQQSKEEDEKDVGEDETDRKVPSFAETTEKNEEEETVTKPSGDEAEATISCDENGVDEGFPYARPPVCELTGDIRISPKEKTMFFVNPSSAGAFDGNGEKKIRPYARKDDFLLPGVVEVIIKSVSSPAIAPACTRTHNVPAVVFSVAGYTDNFFHDNTDVMIPLFLTTSHLAGEVQFLITNFKPWWVHKFTPLLKKLSNYGVINFDKDDEVHCFRRGHLGLYRDRDLIISPHPTRNPRNYSMVDYNRFLRRAFGLPRDSPAVLGDKTGAKPKMLMIERKGTRKLLNLRDVAALCEDLGFAVTVAEAGADVRGFAEKVNAADVLLAVHGAGLTNQIFLPTGAVLVQIVPWGKMDWMATNFYGQPARDMRLRYVEYYVSEEETTLKDKYPRDHYVFKDPMAIHAQGWPALAEIVMKQDVTVNVTRFKPFLLKALDELQE

SEQ ID NO: 27 - protein, 534 aa, Oryza sativa
MVSQSKTPAPEPSTTKMPSAPPAVKGVAKTLAQHHKAVIGFLLGFFLVLLLYTFLSGQLVSSEDAIVRAVTQQSTPAVHTDQDGRTTSPTSPTSTSSNTTQDNLEGKNTERSSQPAVNDEASDKMEEDLIRQDIDQAGTKNGTNHKPGAPRKPICDLLDPRYDICEISGDARTMGTNRTILYVPPVGERGLADDSHEWSIRDQSRKYLEYINKVTVRSLDAQAAPGCTSRHAVPAVVFAMNGLTSNPWHDFSDVLIPLFITTRVYEGEVQFLVSDLQPWFVDKYRLILTNLSRYDIVDFNQDSDVRCYPKITVGLRSHRDLGIDPARTQRNYTMLDFRLYIREVYSLPPAGVDIPFKESSMQRRPRAMLINRGRTRKFVNFQEIAAAVVAAGFEVVPVEPRRDLSIEEFSRVVDSCDVLMGAHGAGLTNFFFLRTNAVMLQVVPWGHMEHPSMVFYGGPAREMRLRDVEYSIAAEESTLYDKYGKDHPAIRDPESIHKQGWQFGMKYYWIEQDIKLNVTRFAPTLQQVLQMLRG

SEQ ID NO: 28 - protein, 364 aa, Oryza sativa
MAGTVTVPSASVPSTPLLKDELDIVIPTIRNLDFLEMWRPFFQPYHLIIVQDGDPTKTIRVPEGFDYELYNRNDINRILGPKASCISFKDSACRCFGYMVSKKKYVFTIDDDCFVAKDPSGKDINALEQHIKNLLSPSTPFFFNTLYDPYREGADFVRGYPFSLREGAKTAVSHGLWLNIPDYDAPTQMVKPRERNSRYVDAVMTVPKGTLFPMCGMNLAFDRDLIGPAMYFGLMGDGQPIGRYDDMWAGWCMKVICDHLSLGVKTGLPYIWHSKASNPFVNLKKEYKGIFWQEDIIPFFQNATIPKECDTVQKCYLSLAEQVREKLGKIDPYFVKLADAMVTWIEAWDELNPSTAAVENGKAK

SEQ ID NO: 29 - protein, 391 aa, Oryza sativa
MLGGGKMKGGETMGGGGGSGSSSISPLVSFVLGAAMATVCILFVMSASPGRRLADISAWSNADDAPPLPLPLQDAAVDSNDSLAAAAAANVTVVAAPAPAPVQAPAPASPYGDLEEVLRRAATKDRTVIMTQINLAWTKPGSLLDLFFESFRLGEGGVSRLLDHLVIVTMDPAAYEGCQAVHRHCYFLRTTGVDYRSEKMFMSKDYLEMMWGRNKFQQTILELGYNFLFTDVDVMWFRDPFRHISMGADIAISSDVFIGDPYSLGNFPNGGFLFVRSNDKTLDFYRSWQQGRWRFFGKHEQDVFNLIKHEQQAKLGIAIQFLDTTYISGFCQLSKDLNKICTLHANCCVGLGAKMHDLRGVLDVWRNYTAAPPDERRSGKFQWKLPGICIH

SEQ ID NO: 30 - protein, 406 aa, Oryza sativa
MTKSATSLLLGAALATVFFLLYTSVCRDLGDGPPKSSPPRWAHAQEQGTATVTPATRVVDAEQGTGRPGRQEEEVVAPREEKQTKDEAASRSGHGGGSVEQQQNQRRIVMPTSQQKETPSSPPQRQQQDLGELLRRAATPDKTVLMTAINEAWAAPGSFLDLFLESFRHGEGTEHLVRHLLVVAMDGRAFERCNAVHQFCYWFRVDGMDFAAEQSYMKGDYLEMMWRRNRFQQTILELGFSFLFTDVDILWFRSPFPHLSPDAQVVMSSDFFVGDPTSPGNYPNGGLLYVRSSASTVRFYEHWQSSRARFPGKHEQFVFDRIVKEGVPPHVGATVRFLDTGHFGGFCQHGKDLGRVVTMHANCCVGLHNKLFDLRNVLDDWKTYKERVAAGNMDYFSWRVPGRCIH

SEQ ID NO: 31 - protein, 449 aa, Oryza sativa
MAAELHFLVVPLIAQGHIIPMVEVARLLAARGARATVVTTPVNAARNGAAVEAARRDGLAVDLAEVAFPGPEFGVPEGLENMDQLADADPGMYLSLQRAIWAMAARLERLVRALPRRPDCLVADYCNPWTAPVCDRLGIARVVMHCPSAYFLLATHNLSKHGVYGRLALAAGDGELEPFEVPDFPVRAVVYTATFRRFFQWPGLEEEERDAVEAERTADGFVINTFRDIEGAFVDGYAAALGRRAWAIGPTFGSISHLAAKQVIELARGVEASGRPFVWTIKEAKAAAAAVREWLDGEGYEERVKDRGVLVRGWAPQVSILSHPATGGFLTHCGWNAALEAIARGVPALTWPTILDQFSSERLLVDVLGVGVRSGVTAPPMYLPAEAEGVQVTGAGVEKAVAELMDGGADGVARRARARELAATARAAVEEGGSSHADLTDMIRHVGAQ

SEQ ID NO: 32 - protein, 480 aa, Oryza sativa
MAPAHAVTPHVVLLPSPGAGHVAPAAQLAARLATHHGCTATIVTYTNLSTARNSSALASLPTGVTATALPEVSLDDLPADARIETRIFAVVRRTLPHLRELLLSFLGSSSPAGVTTLLTDMLCPAALAVAAELGIPRYVFFTSNLLCLTTLLYTPELATTTACECRDLPEPVVLPGCVPLHGADLIDPVQNRANPVYQLMVELGLDYLLADGFLINTFDAMEHDTLVAFKELSDKGVYPPAYAVGPLVRSPTSEAANDVCIRWLDEQPDGSVLYVCLGSGGTLSVAQTAELAAGLEASGQRFLWVVRFPSDKDVSASYFGTNDRGDNDDPMSYLPEGFVERTKGAGLAVPLWAPQVEVLNHRAVGGFLSHCGWNSTLEAASAGVPTLAWPLFAEQKMNAVMLSSERVGLAALRVRPDDDRGVVTREEVASAVRELMAGKKGAAAWKKARELRAAAAVASAPGGPQHQALAGMVGEWKGRG

SEQ ID NO: 33 - protein, 426 aa, Oryza sativa
MSQETPARRSLPHLLLVSAPLQGHVNPLLCLGGRLSSRGLLVTFTTVPHDGLKLKLQPNDDGAAMDVGSGRLRFEPLRGGRLWAPADPRYRAPGDMQRHIQDAGPAALEGLIRRQANAGRPVSFIVANAFAPWAAGVARDMGVPRAMLWTQSCAVLSLYYHHLYSLVAFPPAGAETGLPVPVPGLPALTVGELPALVYAPEPNVWRQALVADLVSLHDTLPWVLVNTFDELERVAIEALRAHLPVVPVGPLFDTGSGAGEDDDCVAWLDAQPPRSVVFVAFGSVVVIGRDETAEVAEGLASTGHPFLWVVRDDSRELHPHGESGGGGDKGKVVAWCEQRRVLAHPAVGCFVTHCGWNSTTEALAAGVPVVAYPAWSDQITNAKLLADVYGVGVRLPVRRRGHERAGGGGDAAEGAGVERQGERGGG

SEQ ID NO: 34 - protein, 153 aa, Oryza sativa
MRVEKAPFPEGFLRRTKGRGLVVMSWAPQRKVLEHSAVGGFVTHCGWNSMLEALTAGVPMLAWPLYAEQRMNKVFLVEEMRLAVAVEGYDKGVVTAEEIQEKARWIMDSNGGRELRERSLAAMWEVKEALSDKGEFKIALLQLTSQWKNYNNS

SEQ ID NO: 35 - protein, 511 aa, Oryza sativa
MTANNSAVGNIDSHLYPLVVLHKHAENTSHNRAMRSRVVLYTWMVRGHLHPMTQLADRIANHGVPVTVAVADVPSSGESRKTVARLSAYYPSVSFQLLPPAAPARSGADTADPDADPFITLLADLRATNAALTAFVRSLPSVEALVIDFFCAYGLDAAAELGVPAYLFFVSCASALASYLHIPVMRSAVSFGQMGRSLLRIPGVHPIPASDLPEVLLLDRDKDQYKATIAFFEQLAKAKSVLVNTFEWLEPRAVKAIRDGIPRPGEPAPRLFCVGPLVGEERGGEEEKQECLRWLDAQPPRSVVFLCFGSASSVPAEQLKEIAVGLERSKHSFLWAVRAPVAADADSTKRLEGRGEAALESLLPEGFLDRTWGRGLVLPSWAPQVEVLRHPATGAFVTHCGWNSTLEAVTAGVPMVCWPMYAEQRMNKVFVVEEMKLGVVMDGYDDDGVVKAEEVETKVRLVMESEQGKQIRERMALAKQMATRAMEIGGSSTASFTDFLGGLKIAMDKDN

SEQ ID NO: 36 - protein, 510 aa, Oryza sativa
MDKTIVLYPGLYVSHFVPMMQLADALLEHGYAVAVALIHVTMDEDATFAAAVARVAAAAKPSVTFHKLPRIHDPPAITTIVGYLEMVRRYNERLREFLRSGVRGRSGGIAAVVVDAPSIEALDVARELGIPAYSFFASTASALAVFLHLPWFRARAASFEELGDAPLIVPGVPPMPASHLMPELLEDPESETYRATVSMLRATLDADGILVNTFASLEPRAVGALGDPLFLPATGGGEPRRRVPPVYCVGPLVVGHDDDDERKENTRHECLAWLDEQPDRSVVFLCFGGTGAVTHSAEQMREIAAGLENSGHRFMWVVRAPRGGGDDLDALLPDGFLERTRTSGHGLVVERWAPQADVLRHRSTGAFVTHCGWNSASEGITARVPMLCWPLYAEQRMNKVFMVEEMGVGVEVAGWHWQRGELVMAEEIEGKIRLVMESEEGERLRSSVAAHGEAAAVAWRKDGGAGAGSSRAALRRFLSDVGGRELRSVETLLLWAFHEIVVARIGLPLD

SEQ ID NO: 37 - protein, 115 aa, Oryza sativa
MAYLLGKPQHELVERQQIGWLAGPFAVIVDLLAPLFVDLLRRRPADAVVFDGVLPWAATAAARLRIPRYAFTGTGCFALPVQRALLLHAPQDRVASDDEPFLVPGLPDAVRLFRP

SEQ ID NO: 38 - protein, 501 aa, Oryza sativa
MTAPMTAESTTQPPSPQPHFVLAPLAAHGHVIPMVDLAGLLAAHGARASLVTTPLNATRLRGVADKAAREKLPLEIVELPFSPAVAGLPSDCQNADKLSEDAQLTPFLIAMRALDAPFEAYVRALERRPSCIISDWCNTWAAGVAWRIGIPRLFFHGPSCFYSLCDLNAVVHGLHEQIVADDEQETTYVVPRMPVRVTVTKGTAPGFFNFPGYEALRDEAIEAMLAADGVVVNTFLDLEAQFVACYEAALGKPVWTLGPLCLHNRDDEAMASCGTGSTDLRAITAWLDEQVTGSVVYVSFGSVLRKLPKHLFEVGNGLEDSGKPFLWVVKESELVSSRPEVQEWLDEFMARTATRGLVVRGWAPQVTILSHRAVGGFLTHCGWNSLLEAIARGVPVATWPHFADQFLNERLAVDVLGVGVPIGVTAPVSMLNEEYLTVDRGDVARVVSVLMDGGGEEAEERRRKAKEYGEQARRAMAKGGSSYENVMRLIARFMQTGVEEH

SEQ ID NO: 39 - protein, 175 aa, Oryza sativa
MYRLDKRIYEERQETKLFNDMIQKVPKYLFEVGHGLEDSGKPFIWVVKVSEVATPEVQEWLSALEARVAGRGVVVRGWAPQLAILSHRAVGGFVTHCGCNSILEDITHGVPVVTWPHISDQFLNERLAVDVLGVGVPEARLPVVTAVKINPYLYRYLGSTTGRYLGSTTACGNCY

SEQ ID NO: 40 - protein, 366 aa, Oryza sativa
MAPTPDSVSATSPPPPLPPPHFVIVPFPAQGHTIPMVDLARLLAERGARASLVVTPVNAAHLRGVADHAARAKLPLEIVEVSFSPSAADAGLPPGVENVDQITDYAHFRPFFDVMRHLAAPLEAYLRALPVPPSCVISDWSNPWTAGVASRVGVPRLFFHGPSCFYSLCDLNAAAHGLQQQGDDDRILQLTMEAMRTADGAVVNTFKDLEDEFIACYEAALGKPVWTLGPFCLYNRDADAMASRGNTLDVAQSAITTWLDGMDTDSVTYVNFGSLACKVPKYLFEVGHGLEDSGKPFICVVKESEVATPEVQEWLSALEARVAGRGVVAACGTIFGVIPFVSRRSLGIISGMTGAGVNFGAGLTQL

SEQ ID NO: 41 - protein, 508 aa, Oryza sativa
MAPTAELDTATSPPPPHFVIVPFPAQGHTIPMVDLARLLAERGVRASLVVTPVNAARLRGAADHAARAELPLEIVEVPFPPSAADAGLPPGVENVDQITDYAHFRPFFDVMRELAAPLEAYLRALPAPPSCIISDWSNSWTAGVARRAGVPRLFFHGPSCFYSLCDLNAAAHGLQQQGDDDRYVVPGMPVRVEVTKDTQPGFFNTPGWEDLRDAAMEAMRTADGGVVNTFLDLEDEFIACFEAALAKPVWTLGPFCLYNRDADAMASRGNTPDVAQSVVTTWLDAMDTDSVIYVNFGSLARKVPKYLFEVGHGLEDSGKPFIWVVKESEVAMPEVQEWLSALEARVAGRGVVVRGWAPQLAILSHRAVGGFVTHCGWNSILESIAHGVPVLTWPHFTDQFLNERLAVNVLGVGVPVGATASVLLFGDEAAMQVGRADVARAVSKLMDGGEEAGERRRKAKEYGEKAHRAMEKGGSSYESLTQLIRRFTLQEPKNSSSITVECSANRHI

SEQ ID NO: 42 - protein, 387 aa, Oryza sativa
MRRFVPQLRALVVGIGSTTAAIVCDFFGTPALALVAELGVPGYVFFPTSISFISVVRSVVELHDDAAVGEYRDLPDPLVLPGCAPLRHDEIPDGFQDCADPNYAYVLEEGRRYGGADGFLVNSFPEMEPGAAEAFRRDAENGAFPPVYLVGPFVRPNSNEDPDESACLEWLDHQPAGSVVYVSFGSGGALSVEQTAELAAGLEMSGHNFLWVVRMPSTGRLPYSMGAGHSNPMNFLPEGFVERTSGRGLAVASWAPQVRVLAHPATAAFVSHCGWNSTLESVSSGVPMIAWPLYAEQKMNTVILTEVAGVALRPVAHGGDGGVVSRKEVAAAVKELMDPGEKGSAVRRRARELQAAAAARAWSPDGASRRALEEVAGKWKNAVREDR

SEQ ID NO: 43 - protein, 484 aa, Oryza sativa
MAEAATGATDTSLPPPPPHVVLMASPGAGHLIPLAELARRLVSDHGFAVTVVTIASLSDPATDAAVLSSLPASVATAVLPPVALDDLPADIGFGSVMFELVRRSVPHLRPLVVGSPAAAIVCDFFGTPALALAAELGVPGYVFFPTSISFISVVRSVVELHDGAAAGEYRDLPDPLVLPGCAPLRHGDIPDGFRDSADPVYAYVLEEGRRYGGADGFLVNSFPEMEPGAAEAFRRDGENGAFPPVYLVGPFVRPRSDEDADESACLEWLDRQPAGSVVYVSFGSGGALSVEQTRELAAGLEMSGHRFLWVVRMPRKGGLLSSMGASYGNPMDFLPEGFVERTNGRGLAVASWAPQVRVLAHPATAAFVSHCGWNSALESVSSGVPMIAWPLHAEQKMNAAILTEVAGVALPLSPVAPGGVVSREEVAAAVKELMDPGEKGSAARRRARELQAAAAARAWSPDGASRRALEEVAGKWKNAVHEDR

SEQ ID NO: 44 - protein, 471 aa, Oryza sativa
MAELARRLVAFHGCAATLVTFSGLAASLDAHSAAVLASLPASSVAAVTLPEVTLDDVPADANFGTLIFELVRRSLPNLRQFLRSIGGGVAALVSDFFCGVVLDLAVELGVPGYVFVPSNTASLAFMRRFVEVHDGAAPGEYRDLPDPLRLAGDVTIRVADMPDGYLDRSNPVFWQLLEEVRRYRRADGFLVNSFAEMESTIVEEFKTAAEQGAFPPVYPVGPFVRPCSDEAGELACLEWLDRQPAGSVVFVSFGSAGMLSVEQTRELAAGLEMSGHGFLWVVRMPSHDGESYDFATDHRNDDEEDRDGGGHDDDPLAWLPDGFLERTSGRGLAVASWAPQVRVLSHPATAAFVSHCGWNSALESVSAGVPMVPWPLYAEQKVNAVILTEVAGVALRPAAARGGVDGVVTREEVAAAVEELMDPGEKGSAARRRAREMQAAAARARSPGGASHRELDEVAGKWKQTNRAPYE

SEQ ID NO: 45 - protein, 498 aa, Oryza sativa
METFTADDQRDADAPRPPRVVLLASPGAGHLIPLAELARWLADHHGVAPTLVTFADLEHPDARSAVLSSLPATVATATLPAVPLDDLPADAGLERTLFEVVHRSLPNLRALLRSAASLAALVPDIFCAAALPVAAELGVPGYVFVPTSLAALSLMRRTVELHDGAAAGEQRALPDPLELPGGVSLRNAEVPRGFRDSTTPVYGQLLATGRLYRRAAGFLANSFYELEPAAVEEFKKAAERGTFPPAYPVGPFVRSSSDEAGESACLEWLDLQPAGSVVFVSFGSAGTLSVEQTRELAAGLEMSGHRFLWVVRMPSFNGESFAFGKGAGDEDDHRVHDDPLAWLPDGFLERTSGRGLAVAAWAPQVRVLSHPATAAFVSHCGWNSTLESVAAGVPMIAWPLHAEQTVNAVVLEESVGVAVRPRSWEEDDVIGGAVVTREEIAAAVKEVMEGEKGRGMRRRARELQQAGGRVWSPEGSSRRALEEVAGKWKAAATATAHK

SEQ ID NO: 46 - protein, 489 aa, Oryza sativa
MEPFTSAAVEPAPPTADDQRDAPRPHVVLLASPGAGHLIPLAELARRLADHHGVAPTLVTFADLDNPDARSAVLSSLPASVATATLPAVPLDDIPADAGLERMLFEVVHRSLPHLRVLLRSIGSTAALVPDFFCAAALSVAAELGVPGYIFFPTSITALYLMRRTVELHDFAAAGEYHALPDPLELPGGVSLRTAEFPEAFRDSTAPVYGQLVETGRLYRGAAGFLANSFYELEPAAVEDSKKAAEKGTFPPAYPVGPFVRSSSDEAGESACLEWLDLQPAGSVVFVSFGSFGVLSVEQTRELAAGLEMSGHRFLWVVRMPSLNDAHRNGGHDEDPLAWVPDGFLERTRGRGLAVAAWAPQVRVLSHPATAAFVSHCGWNSTLESVATGVPMIAWPLHSEQRMNAVVLEESVGMALRPRAREEDVGGTVVRRGEIAVAVKEVMEGEKGHGVRRRARELQQAAGRVWSPEGSSRRALEVVAGKWKAAAQK

SEQ ID NO: 47 - protein, 637 aa, Oryza sativa
MASGDGAAQTTEDSRRRATTSTSTPTCSAATSRSASRSSRPLAPSRAPGRPRHPPRPTRRAHPASPRASWAEAARLERRRRRRATGQPKRRWPPGSSGGGARGGSSGGDSDGHQGGPSGGGDDSGGRAFLRAVLSLLAAAHTLANNIAINRPLGFIDHTSTRSDDSGEREIVGDGRRRRRRPGRGDVPLAGVRPHDPLPPAVQAPRGEGPRRLLPLHAAKPRQAPAGAGEPFRSSPPPAAADADTVEGLPEGAESTADVTPDKDGLVKKACDGLAAPFAAFLAGRAKRPDWIVVDFCHHWLPPIADEHCVPCAMFHIIPAAMNAMFGPRWANARYPRTAPEDFTVPPKWIPFPSTIAFRRREFGWIAGAFKPNASGLPDVERFWRTEERCRLIINSSCHELEPPQLFDFLTGLFRKPTVPAGILPPTTNLVTDDDDDDDRSEVLQWLDGQPPKSVIYVALGSEAPLSANDLHELALGLELAGVRFLWAIRSPTAGGVLPDGFEQRTRGRGVVWGRWVAQVRVLAHGAVGAFLTHCGWGSTIEGVALGQPLVMLPLVVDQGIIARAMAERGVGVEIARDESDGSFDRDAVAAAVRRVAVGGEREAFASNANRIKDVVGDQEREERYIDELVGYLRRYS

SEQ ID NO: 48 - protein, 494 aa, Oryza sativa
MQSPENAAPRVYFIPFPTPGHALPMCDLARLFASRGADATLVLTRANAARLGGAVARAAAAGSRIRVHALALPAEAAGLTGGHESADDLPSRELAGPFAVAVDLLAPLFADLLRRRPADAVVFDGVLPWAATAAAELRVPRYAFTGTGCFALSVQRALLLHAPQDGVASDDEPFLVPGLPDAVRLTKSRLAEATLPGAHSREFLNRMFDGERATTGWVVNSFADLEQRYIEHYEKETGKPVFAVGPVCLVNGDGDDVMERGRGGEPCAATDAARALAWLDAKPARSVVYVCFGSLTRFPDEQVAELGAGLAGSGVNFVWVVGGKNASAAPLLPDVVHAAVSSGRGHVIAGWAPQVAVLRHAAVGAFVTHCGWGAVTEAAAAGVPVLAWPVFAEQFYNEALVVGLAGTGAGVGAERGYVWGGEESGGVVVCREKVAERVRAAMADEAMRRRAEEVGERARRAVEVGGSSYDAVGALLEDVRRREMAADPRNVKEV

SEQ ID NO: 49 - protein, 505 aa, Oryza sativa
MAAAHFVFVPLMAQGHLIPAVDTALLLATHGAFCTVVATPATAARVRPTVDSARRSGLPVRLAEFPLDHAGAGLPEGVDNMDNVPSEFMARYFAAVARLREPVERHLLLRADEGGAPPPTCVVADFCHPWASELAAGLAVPRLTFFSMCAFCLLCQHNVERFGAYDGVADDNAPVVVPGLARRVEVTRAQAPGFFRDIPGWEKFADDLERARAESDGVVINTVLEMEPEYVAGYAEARGMKLWTVGPVALYHRSTATLAARGNTAAIGADECLRWLDGKEPGSVVYVSFGSIVHPEEKQAVELGLGLEASGHPFIWVVRSPDRHGEAALAFLRELEARVAPAGRGLLIWGWAPQALILSHRAAGAFVTHCGWNSTLEAATAGLPVVAWPHFTDQFLNAKMAVEVLGIGVGVGVEEPLVYQRVRKEIVVGRGTVEAAVRSAMDGGEEGEARRWRARALAAKARAAAREGGSSHANLLDLVERFRPRHVAASEAANGTTAPPPPPRQ

SEQ ID NO: 50 - protein, 487 aa, Oryza sativa
MHTTNGAPACCDANADTPPLHLIFVPFLSRSHFGPVTAMAAEADACHRGGRTAATIVTTRHFAAMAPASVPVRVAQFGFPGGHNDFSLLPGEVSAAAFFAAAEEALAPALGAAVRGLLREGGSTATVTVVSDAVLHWAPRVARECGVLHVTFHTIGAFAAAAMVAIHGHLHLREAMPDPFGVDEGFPLPVKLRGVQVNEEALVHLPLFRAAEAESFAVVFNSFAALEADFAEYYRSLDGSPKKVFLVGPARAAVSKLSKGIAADGVDRDPILQWLDGQPAGSVLYACFGSTCGMGASQLTELAAGLRASGRPFLWVIPTTAAEVTEQEERASNHGMVVAGRWAPQADILAHRAVGGFLSHCGWNSILDAISAGVPLATWPLRAEQFLNEVFLVDVLRVGVRVREAAGNAAMEAVVPAEAVARAVGRLMGDDDAAARRARVDELGVAARTAVSDGGSSCGDWAELINQLKALQLTSSRDRRTDAVTRD

SEQ ID NO: 51 - protein, 504 aa, Oryza sativa
MAHVLVVPYPSQGHMNPMVQFARKLASKGVAVTVVTTRFIERTTSSSAGGGGLDACPGVRVEVISDGHDEGGVASAASLEEYLATLDAAGAASLAGLVAAEARGAGADRLPFTCVVYDTFAPWAGRVARGLGLPAVAFSTQSCAVSAVYHYVHEGKLAVPAPEQEPATSRSAAFAGLPEMERRELPSFVLGDGPYPTLAVFALSQFADAGKDDWVLFNSFDELESEVLAGLSTQWKARAIGPCVPLPAGDGATGRFTYGANLLDPEDTCMQWLDTKPPSSVAYVSFGSFASLGAAQTEELARGLLAAGRPFLWVVRATEEAQLPRHLLDAATASGDALVVRWSPQLDVLAHRATGCFVTHCGWNSTLEALGFGVPMVAMPLWTDQPTNALLVERAWGAGVRARRGDADADDAAGGTAAMFLRGDIERCVRAVMDGEEQEAARARARGEARRWSDAARAAVSPGGSSDRSLDEFVEFLRGGSGADAGEKWKTLVWEGSEAAASEM

SEQ ID NO: 52 - protein, 488 aa, Oryza sativa
MADAIGGGGRRRRLRVFFLPFFAKGHLIPMTDLACRMAAAGPEEMDATMVVTPGNAALIATAVTRAAARGHPVGVLCYPFPDVGMERGVECLGVAAAHDAWRVYRAVDLSQPIHEALLLEHRPDAIVADVPFWWATDIAAELGVPRLTFSPVGVFPQLAMNNLVTVRAEIIRAGDAAPPVPVPGMPGKEISIPASELPNFLLRDDQLSVSWDRIRASQLAGFGVAVNTFVDLEQTYCHEFSRVDARRAYFVGPVGMSSNTAARRGGDGNDECLRWLSTKPSRSVVYVSFGSWAYFSPRQVRELALGLEASNHPFLWVIRPEDSSGRWAPEGWEQRVAGRGMVVHGCAPQLAVLAHPSVGAFVSHCGWSSVLEAASAGVPVLAWPLVFEQFINERLVTEVVAFGARVRGGGRRSAREGEPETVPAEAVARAVAGIMARGGDGDRARARARVLAERARAAVGEGGSSWRDIHRLIDDLTEATASPEPQLQ

SEQ ID NO: 53 - protein, 483 aa, Oryza sativa
MGDGGGGGLDVVVFPWLAFGHMIPYLELSKRLAARGHDVTFVSTPRNVSRLPPVPAGLSARLRFVSLPMPPVDGLPEGAESTADVPPGNDELIKKACDGLAAPFAAFMADLVAAGGRKPDWIIIDFAYHWLPPIAAEHNAAAIAFLGPRWANAAHPRAPLDFTAPPRWFPPPSAMAYRRNEARWVVGAFRPNASGVSDIERMWRTIESCRFTIYRSCDEVEPGVLALLIDLFRRPAVPAGILLTPPPDLAAADDDDVDGGSSADRAETLRWLDEQPTKSVIYVALGSEAPVTAKNLQELALGLELAGVRFLWALRKPAAGTLSHASAADADELLPDGFEERTRGRGVVWTGWVPQVEVLAHAAVGAFLTHCGWGSTIESLVFGHPLVMLPFVVDQGLVARAMAERGVGVEVAREDDDEGSFGRHDVAAAVRRVMVEDERKVFGENARKMKEAVGDQRRQEQYFDELVERLHTGGGEINDEKYC

SEQ ID NO: 54 - protein, 493 aa, Oryza sativa
MAAATADGHGGRRRLRVFFLPFFARGHLIPMTDLACLMAAASTDAVEVEATMAVTPANAAAIAATVAGNAAVRVVCYPFPDVGLARGVECLGAAAAHDTWRVYRAVDLSRPAHESLLRHHRPDAIVADVPFWWATGVAAELGVPRLTFNPVGVFPQLAMNNLVAVRPDIVRGGADGPPVTVPGMPGGREITIPVSELPDFLVQDDHLSMSWDRIKASQLAGFGVVVNTFAALEAPYCDEFSRVDARRAYFVGPVSQPSRAAAAAVRRGGDGDVDCLRWLSTKPSQSVVYVCFGSWAHFSVTQTRELALGLEASNQPFLWVIRSDSGDGGGERWEPEGWERRMEGRGMVVRGWAPQLAVLAHPSVGAFVTHCGWNSVLEAAAAGVPALTWPLVFEQFINERLVTEVAAFGARVWEDGGGKRGVRAREAETVPAGVIARAVAGFMAGGGGRRERAAAMATALAESARVAVGENGSSWRDIRRLIQDLTDATASQP

SEQ ID NO: 55 - protein, 355 aa, Oryza sativa
MEAEVASALVGTCMPCNQFVLSYQIVDSMIWLGIRDMINEFRKKKLKLRPVTYLSGAQGSGNDIPHGYIWSPHLVPKPKDWGLKIDVVGFCFLDLASNYVPPEPLIKWLEAGDKPIYVGFGSLPVQDPAKMTEVIVKALEITGQRGIINKGWGGLGTLAEPKDFVYLLDNCPHDWLFLQCKAVLLIMSSFHGVHHGGAGTTAAGLKAACPTTIVPFFGDQPFWGDRVHARGVGPLPIPVDQFSLRKLVDAINFMMEPKVKEKAVELAKAMESEDGVSGVVRAFLRHLPLRAEETTPQPTSSFLEFLGPFSFYDIFHVMALQAIVALYMCQYHLEASLSVSSRVIILVDPTAEGIC

SEQ ID NO: 56 - protein, 259 aa, Oryza sativa
MPHLADQPTISKYMESLWGMGVRVWQEKSGGIQREEVERCIREVMDGDRKEDYRRSAARLMKKAKEAMHEGGRQCGAHVSTCRISITFPKPSGAARLPATKEGGRAYRSGDDGGGVDAGARRGDEAQRGGGARRLRGGGGGFQIGGDAGDGKERGKGEKVMRTNMLIECRKSRVFVASRLHELMSEAKRHSLYFCRLGKQRAQLTVFGHMIHPFAEEAGDLRSWAFFNWMVLVAIGALSNAITTIVSYLSAKSTCLNLR

SEQ ID NO: 57 - protein, 372 aa, Oryza sativa
MGSMSTPPPAAVTAANATSNVGDDNRGGGRVLLLPFPAAQGHTNPMLQFGRRLAYHGLRPTLVTTRYVLSTTPPPGDPFRVAAISDGFDDDAGGMAALPDYGEYHRSLEAHGARTLAELLVSEARAGRPARVLVFDPHLPWALRVARDAGVGAAAFMPQPCAVDLIYGEVCAGRLALPVTPADVSGLYARGALGVELGHDDLPPFVATPELTPAFCEQSVAQFAGLEDADDVLVNSFTDLEPKEAAYMEATWRAKTVGPLLPSFYLGDGRLPSNTAYGFNLFTSTVPCMEWLDKQPPRSVVFVSYGTFSGYDAAKLEEVGNGLCNSGKPFLWVVRSNEEHKLSRELREKCGKRGLIVPFCPQLEVLSHKATG

SEQ ID NO: 58 - protein, 205 aa, Oryza sativa
MASMNDQHGGATAHVLLVPLPAQGHMNPMLQFGRRLAYHGLRPTLVATRYVLSRSPPPGDPFRVAAFSDGFDAGGMASCPDPVEYCRRLEAVGSETLARVIDAKARAGRAATVLVYDPHMAWVPRVARAAGVPTAAFLSQPCAVDAIYGEVWAGRVPLPMEDGGDLRRRGVLSVDLATADLPPFVAAPELYPKYLDISIVRISPL

SEQ ID NO: 59 - protein, 454 aa, Oryza sativa
MGSMSTPAASATTSNIEDNNNGGQVLLLPFPAAQGHTNPMLQFGRRLAYHGLRPTLVTTQYVLSTTPPPGDPFRVAAISDGFDDASGMAALPDPGEYLRTLEAHGSPTLAELLLSEARAGRPARVLVYDPHLPWARRVARAAGVATVAFLSQPCAVDLIYGEVCARRLALPVTPTDASGLYARGVLGVELGPDDVPPFVAAPELTPAFCEQSVEQFAGLEDDDDILVNSFTDLEPKEAAYMESTWRGKTVGPLLPSFYLDDGRLRSNTAYGFNLFRSTVPCMEWLDKQPPRSVVLVSYGTISTFDVAKLEELGNGLCNSGKPFLWVVRSNEEHKLSVQLRKKCEKRGLIVPFCPQLEAIVNGIPLVAMPHWADQPTISKYVESLWGTGVRVQLDKSGSLQREEVERCIREVMDGDRKEDYRRNAARLMKKAKESMQEGGSSDKNIAEFAAKYSN

SEQ ID NO: 60 - protein, 427 aa, Oryza sativa
MSTPKKHVLFPFTSKGHIAGFLSLASRLHRILPHATITLVSTPRNVAALRAAAAAPFLDFHALRFDPAEHGLPPGGESQDEIFPPLLIPLYEAFETLQPAFDDFVASTAAAAARVVVISDVFVAWTVEVARRHGSQVPKYMLYQYGLPAAGAANDGSGGRADRRFLDRQLAHGNNTDAVLVNAVAEPEPAGLAMLRRTLRVLPVWPIGPLSRDRRDAATEPTDDTVLRWMDTQPPGSVLYISFGTNSMIRPEHMLELAAALESSGRCFLWKIKPPEGDVAGLNGGATTPSSYNRWLAEGFEERVRILAHPSTAAFLSHCGWSSVLESMAHGVPVIGWLLTAEQFHNVMVLEGLGVCVEVARGNTDETVVERRRVAEVVKMVMGETAKADDMRRRVQEVRTMMVDAWKEEGGSSFEASQAFLEAMKLK

SEQ ID NO: 61 - protein, 340 aa, Oryza sativa
MATARGARGATGDATATRRGSGGAQLEAAMGRDTGLGVDVTSTKSGTYGYQTDLGTWYLQDKVLEHDAVGVFLTHSGWNSTLESPASGVLMLSWLFFAEQQTNCRYKQTEWGVAMEIGGEAWRGEVAAMTLEAMEGEKGREMRQRAEEWKQKAVQVTLLGGPWDTNLDRVIHEVLLSCKDKTLSVNASASAQILALYELQKQQHKFLEQQHNFQMPQNFQKQQHQSSAVAISFQQQQQQQILANSTIKAGSLIFPLATPGAEDEDATQDIPALCQSTMTNCLGHLLALLARLKEWKEKAVRVTMPSGPGDTNLDRIIHEVLLSCKGENGSGSVGSHPSHS

SEQ ID NO: 62 - protein, 490 aa, Oryza sativa
MGATGDKPPHAVCVPYPSQGDITPTLHLAKLLHARGFHVTLVNTEFNHRRLLASRGAAALDGVPGFVFAAIPDGLPAMSGEHEDATQDIPALCQSTMTNCLGHLLALLSRLNEPASGSPPVTCLVADGLMSFAYDAASACGFVGCRLYRELIDRGLVPLRDAAQLTDGYLDTVVDGAAARGMCDGVQLRDYPSFIRTTDLGDVMLNFIMREAERLSLPDAVILNTFDDLERPALDAMRAVLPPPVYAVGPLHLHVRRAVPTGSPLHGVGSNLWKEQDGLLEWLDGHRPSSVVYVSYGSIAVMTSEQLLEFAWGLADSGYAFVWVVRPDLVKGGEGDAAALPPEFHAAVEGRGVLPAWCPQEKVLEHDAVGVFLTHSGWNSTLESLAAGVPMLSWPFFAEQQTNCRYKRTEWGIGMEIGGNARRGEVAAMIREAMEGKKGREIRRRAQEWKEKAVRVTLPGGPGDTNLDRVIHDVLLSCKDKISRVNGESV

SEQ ID NO: 63 - protein, 475 aa, Oryza sativa
MGSFPAAEETTATAAARPHAVMVPYPAQGHVTPMLKLAVLLHARGFHVTFVNNEFNHRRLLRARGAGALDGAPGFRFAAIDDGLPPSDADATQDVPALCHSVRTTCLPRFKALLAKLDEEADADAGAGAGDARRVTCVVADSTMAFAILAARELGLRCATLWTASACGEADLSNGHLDTKMDWIPGMPADLRLRDLPSVVRSTDRDDIMFNFFIDVTATMPLASAVILNTFDELDAPLMAAMSALLPPIYTVGPLHLTARNNLPADSPVAGVGSNLWKEQGEALRWLDGRPPRSVVYGSITVMSAEHLLEFAWGLAGSGYAFLWNVRPDLVKGDAAALPPEFAAATGERSMLTTWCPQAEVLEHEAVGVFLTHSGWNSTLESIVGDVPMVCWPFFAEQQTNCRYKRTEWGIGAEIPDDVRRGEVEALIREAMDGEKGREMRRRVAELRESAVASGQQGGRSMQNLDRLIDEVLLA

SEQ ID NO: 64 - protein, 358 aa, Oryza sativa
MATARGARGATGDATATRRGSGGAQLEAATGRDTGLGVDVTSTKSGTYGYQTDLGTCGVLRAWCPQDKVLEHDAVGVFLTHSGWNSTLESPASGVPMLSWLFFAEQQTNCRYKQTEWGVAMEIGGEAWRGEVAAMTLEAMEGEKGREMRQRAEEWKHKAVQVTLLGGPWDTNLDRVIHEVLLSCKDKTLRVNASASAQILALYELQKQQHKFLEQQHNFQMPQNFQKQQHQSSAVAISFQQQQQQQILANSTIKAGSLIFPLATPGAEDEDATQDIPALCQSTMTNCLGHLLALLARLKEWKEKAVRVTMPSGPGDTNLDRIIHEVLLSCKGENGSGSLHYEKRNAWRKRLALFAPWS

SEQ ID NO: 65 - protein, 502 aa, Oryza sativa
MDCHRNESQRELEMGTKPHFVVIPWLATSHMIPIVDIACLLAAHGAAVTVITTPANAQLVQSRVDRAGDQGASRITVTTIPFPAAEAGLPEGCERVDHVPSPDMVPSFFDAAMQFGDAVAQHCRRLTGPRRLSCLIAGISHTWAHVLARELGAPCFIFHGFCAFSLLCCEYLHAHRPHEAVSSPDELFDVPVLPPFECRLTRRQLPLQFLPSCPVEYRMREFREFELAADGIVVNSFEELERDSAARLAAATGKKVFAFGPVSLCCSPALDDPRAASHDDAKRCMAWLDAKKARSVLYVSFGSAGRMPPAQLMQLGVALVSCPWPVLWVIKGAGSLPGDVKEWLCENTDADGVADSQCLAVRGWAPQVAILSHRAVGGFVTHCGWGSTLESVAAGVPMAAWPFTAEQFVNEKLIVDVLGIGVSIGVTKPTGGMLTAGGGGGEETAEVGTEQVKRALNSLMDGGVEGEERAKKVHELKAKAHAALEKEGSSYMNLEKLILSAV

SEQ ID NO: 66 - protein, 493 aa, Oryza sativa
METATSKPHFVLVPWIGSISHILPMTDIGCLLASHGAPVTIITTPVNSPLVQSRVDRATPHGAGITVTTIPFPAAEAGLPEGCERLDLIPSPAMVPGFFRASRGFGEAVARHCRRQDARPRRRPSCIIAGMCHTWALGVARELGVPCYVFHGFGAFALLCIEYLFKQRRHEALPSADELVDIPVLPPFEFKVLGRQLPPHFVPSTSMGSGWMQELREFDMSVSGVVVNIFEDLEHGSAALLAASAGKKVLAVGPVSLPHQPILDPRAASDDARRCMAWLDAKEARSVVYVSFGSAGRMPAAQLMQLGMALVSCPWPTLWVFNGADTLPGDVRDWLRENTDADGVAHAHSKCLVVRGWAPQVAILDHPAVGGFMTHCGWGSTLESVAAGMPMVTWPFFAEQFINERLIVDVLGIGVSVGVTRPTENVLTAGKLGGAEAKVEIGADQVKKALARLMDEGEDMRRKVHELKEKARAALEEGGSSYMNLEKLIHSSV

SEQ ID NO: 67 - protein, 544 aa, Oryza sativa
MALSSPSSPPIKSRKPASSEDSVAMAAAPLHFVLVPLPAQGHVIPMMDMARLIAGHGGGGARVTVVLTPVMAARHRAAVAHAARSGLAVDVSVLEFPGPALGLAAGCESYDMVADMSLFKTFTDAVWRLAAPLEAFLRALPRRPDCVVADSCSPWTAGVARRLGVPRLVFHGPSALYILAVHNLARHGVYDRVAGDLEPFDVPDLPAPRAVTTNRASSLGLFHWPGLESHRQDTLDAEATADGLVFNTCAAFEEAFVRRYAEVLGGGARNVWAVGPLCLLDADAEATAARGNRAAVDAARVVSWLDARPPASVLYVSFGSIARLNPPQAAELAAGLEASHRPFIWVTKDTDADAAAAAGLDARVVADRGLVIRGWAPQVTILSHPAVGGFLTHCGWNSTVESLSHGVPLLTWPHFGDQFLNECLAVDVLGAGVRAGVKVPVTHVDAVNSPVQVRSGEVASAVEELMGDGAAAAARRARARELAAEARAAMADGGSSARDLADMVWHVARRRDMVVVDPPPPPSPGGIAGGHGKMVSPSVASEVA

SEQ ID NO: 68 - protein, 252 aa, Oryza sativa
MNSLDDVPKPHFVLIPFMAQGHTIPMIDMAHLLAKHGAMVSFITTPVNAARIQSTIDRARELNIPIRFVPLRLPCAEVGLLDGCENVDEILEKDQVMKMTDAYGMLHKPLVLYLQEQSVPPSCIVSDLCQPWTGDVARELGIPRLMFNGFCAFASLCRYLIHQDKVFENVPDGDELVILPGFPHHLEVSKARSPGNFNSPGFEKFRTKILDEERRADSVVTNSFYELEPSYVDSYQKMIGKRGIFFIYNFFY

SEQ ID NO: 69 - protein, 216 aa, Oryza sativa
MARTVFLQLEEIALGLEASKRPFLWVIKSDNMPSETDKLFLPEGFEERTRGRGLIIQGWAPQALILSHPSVGGFVTHCGWNSKIEGVSAGLPMITWPHCAEQFLNEELIMNALKVGLAVGVQSITNRTMKAHEISVVKRDQIERAVVELMGDETGAEERRARAKELKEKARKAIDEGSSYNNIVLKNFRRCILRPLSKEKVGKIVGRKGTWKGNQG

SEQ ID NO: 70 - protein, 490 aa, Oryza sativa
MGGGRGGAPATASARARRPHQPRVLLLCSPCLGHLIPFAELARRLVADHGLAATLLFASARSPPSEQYLAVAASVLAEGVDLVALPAPAPADALPGDASVRERAAHAVARSVPRVRDVARSLAATAPLAALVVDMIGAPARAVAEELGVPFYMFFTSPWMLLSLFLHLPSLDADAARAGGEHRDATEPIRLPGCVPIHAHDLPSSMLADRSSATYAGLLAMARDAARADGVLVNTFRELEPAIGDGADGVKLPPVHAVGPLIWTRPVAMERDHECLSWLNQQPRGSVVYVSFGSGGTLTWQQTAELALGLELSQHRFIWAIKRPDQDTSSGAFFGTANSRGEEEGMDFLPEGFIERTRGVGLLVPSWAPQTSILGHASIGCFLTHCGWNSTLESVSNGVPMIAWPLYAEQKMNAAMMEVQAKVAIRINVGNERFIMNEEIANTIKRVMKGEEAEMLKMRIGELNDKAVYALSRGCSILAQVTHVWKSTVG

SEQ ID NO: 71 - protein, 486 aa, Oryza sativa
MASTDRSKKLRVLLIPFFATSHIGPFTDLAVRLVTARPDAVEPTIAVTPANVSVVRSALERHGSAATSVVSIATYPFPEVAGLPRGVENLSTAGADGWRIDVAATNEALTRPAQEALISGQSPDALITDAHFFWNAGLAEELGVPCVSFSVIGLFSGLAMRFVTAAAANDDSDSAELTLAGFPGAELRFPKSELPDFLIRQGNLDGIDPNKIPQGQRMCHGLAVNAFLGMEQPYRERFLRDGLAKRVYLVGPLSLPQPPAEANAGEASCIGWLDSKPSRSVLYVCFGTFAPVSEEQLEELALGLEASGEPFLWAVRADGWSPPAGWEERVGERGVLVRGWVPQTAILSHPATAAFLTHCGSSSLLEAVAAGVPLLTWPLVFDQFIEERLVTDVLRIGERVWDGPRSVRHEEAMVVPAAAVARAVARFLEPGGAGDAARLRAQELAAEAHAAVAEGGSSYRDLRRLVDDMVEARAAGGEAAAAPQPQ

SEQ ID NO: 72 - protein, 484 aa, Oryza sativa
MASAERSKKLRVLLMPFFATSHIGPCTDLAVRLAAARPDVVEPTLAVTPANVSVVRSALRLHGSAASTVVSIATYPFPEAAGLPPGVENLSTAGDERWRVDAAAFDEAMTWPAQEALIKDQSPDVLITDFHFSWNVGIAEELAMPCVQLNVIGLFSTLAVYLAAAVVNDSDSEELTVAGFPGPELRIPRSELPDFLTAHRNLDLVDNMRKLVQVNTRCHGFAVNSFLFLDKPYCEKFMCNGFAKRGYYVGPLCLPQPPAVASVGEPTCISWLDSKPNRSVVYICFGTFAPVSEEQLHELALGLEASGKPFLWAVRAADGWAPPAGWEERVGDRGLLVRDWVPQTAILAHSATAAFLTHCGWNSVLEGVTAGVPLLTWPLVFEQFITERLVMDVLRIGERVWDGARSVRYKEAALVPAAAVARAVARFLEPGGAGDAARIRAQDFAAEAHAAVAEGGSSYGDLRRLIDDLVEARADAGESALQPL

SEQ ID NO: 73 - protein, 488 aa, Oryza sativa
MASAERSKKLRILFIPFFATSHIGPFTDLAVRLAAARPDIVEPTIAVTPANVSVVRSAVKRHGSVASSMVSIAKYPFPDVAGLSPGVENLSTAGDEGWRIDNAAFNEALTRPPQEAVIREQSPDVLITDSHFSWIVYIAEGLGMACFRFCVIGFFSILAMRLLAGAAADANGSDSESLTAAGFPGPKLQIPRSEVPDFLTRQQNFDKFDMRKLQQSQDRCHGIVVNSFLFLDKPYCEKFVCNGFAKRGYHVGPLCLPKPPAVGNVGEPSCISWLDSKPSRSVVYICFGTFAPVSEEQLHELALGLEASGKPFLWAVRAADGWAPPAGWEERVGDRGLLVRDWVPQTAILAHSATAAFLTHCGWNSMLEGATAGVPLLTWPLVFEQFITERFVTDVLRIGERVWDGPRSVRYEEKAVVPAAAVARAVARFLEPGGTGDAARIRAQELAAEAHAAVAEGGSSYDDLRRLIDDMVEARAAAGGVAPARQPQ

SEQ ID NO: 74 - protein, 270 aa, Oryza sativa
MASDGSSKKLRVVLIPFFATSHIGPFTDFAVRLAAAWPDAVEATLAVTPANVPVVRSLLERHGPAGAGSVAIATYPFPAVDGLPAGVENLSKAAPGDAWRINAVADDEALMRPAQESLVRELRPDVIVTDAHFFWNAGLADELGVPCVQFYAIGAFSTIAMAHLVGAVKEGAKEAAGKPFLWVVRTDMWAPPDGWKERVGDRGMVIRGWAPQKAILAHPSVGAFVTQCGWNSVLEAVSAGVPVLTWPMVFEQLDFSHFGPFEKLISQIDP

SEQ ID NO: 75 - protein, 273 aa, Oryza sativa
MKKTMVLYPGLSVSHFLPMMQFADELIDRGYAITVALIDPVFQQHIAFPATVDRAISSKPAIRFHRLPRVELPPAITTKDNDFSLLGYLDLVRRHNECLHDFLCSMPPGGAHALVVDPLSVEALDVAKRLNVPGYVFHPGNASAFAIHLQLPLIRAEGQPSFRELGDTPLELPGLPPIPVSYLYEELLEDPESEVYKAIVDLFHRDIQDSNGFLMNTFESLEARVVNALRDARRHGDPAALPPFYCVGPLIEKAGERRETAERHECLAWLDRL

SEQ ID NO: 76 - protein, 440 aa, Oryza sativa
MFQRDSRCHHGGPALPPFYCIRPLVEKADERRDRAERHECLAWLDRQPERSVVFLCFGSTGAGSHSVEQLREIAVGLEKSGQRFLWVVRAPRVAIDDDDDSFNPRAEPDVDALLPAGFLERTTGRGVVVKLWAPQVDVLYHRATGAFVTHCGWNSVLEGITAGVPMLCWPLHSEQKMNMVLMVEEMDIAVEMAGWKQGLVTAEELEAKVRLVMESEAGSQLRARVTAHKEGAATAWADGGSSRSAFARRGKRKWEAPHCGAIARREDGEPEPKLCRPAAPTLPFPALLRHLPCSPRSPSAQPPLCRGLDRHPLSCLSSLRSGPPSATTFIFTTSRAHLSATIVIGAAIPTANFAVGVHGYGSEDLVGGSGCTDLERIGECYGGVGGDQGWQCGGGDERGGGMEREEKNRREGEEGLKKGSEPNIWDSLFRLDSVIESLLE

SEQ ID NO: 77 - protein, 236 aa, Oryza sativa
MKKTIVLYPGVAVSHFLPMMQLADELVDHGYAVAVALIDPAFQQHTAFPATVDRVVSSKPTVRFHRLPRVELPPATATDDGDFLLLGYLDLVRRHNECLHDFLCSMLPGGVHAFVVDSLSVEALDVGERLNVPGFVFHPANLGAFAIFLQLPSIRAEGEPSFRELGDNPLELPGLPPMPASHLFSQFLEHPESQVYKAMMNVSRRMLPTWKRSKIFSENQREFGRRGEETERKTEM

SEQ ID NO: 78 - protein, 478 aa, Oryza sativa
MKKTMVLYPGLSVSHFLPMMKLADELVEHGYAVTVALIDDPLQKQIAFTATVDRVISSKPSICFHRLPRVDHLPAVTTNDGEFYLPGYLDLVRRHNEPLHGFLSSHFRGGIQALVVDMMSVEALDIAERLKVPGYLFHPSNASLFAFFLQIPSICAESKRSFSELGDTPLEIPGLPPMPASHFIDNRPEEPPESEVYKAVMDLVRRYTNKCSNGFLVNTVDSLEARVVNTLRHARRQGGRALPPFYCVGPLVNKAGERGERPERHECLAWLDRQPDRTVVFLCFGSTGIGNHSTEQLREIAVGLEKSGHRFLWVVRAPVVSDDPDRPDLDALLPAGFLERTSGQGAVVKQWAPQVDVLHHRATGAFVTHCGWNSVLEGITAGVPMLCWPLHSEQKMNKVLMVEEMGIAVEMVGWQQGLVTAEEVEAKVRLVMESEAGVELRARVTAHKEAAAVAWTDVGSSRAAFTEFLSNADSRQTS

SEQ ID NO: 79 - protein, 478 aa, Oryza sativa; identical to SEQ ID NO: 78

SEQ ID NO: 80 - protein, 179 aa, Oryza sativa
MAVATPTSTISPAARGKSAAIDADECIQWLDSKDPSSVIYVSFGSIARTDPKQLIELGLGLEASAHPFIWMVKNAELYGDTAREFFPRFEISGVDTVNADPVARHGRWLRDALRVNSIMEVVATRLPMVTWPHSVDQLLNQKMAVEVLGIGVGVGLDESVTEGHCGGEGGGGEGNREHT

SEQ ID NO: 81 - protein, 195 aa, Oryza sativa
MAPAPATLPNAAARRPHALLVPFPSSGFINPMFHFARLLRSAGFVVTFVNTERNHALMLSRGRKRDGDGIRYEAIPDGLSPPERGAQDDYGFGLLHAVRANGPGHLRELIARLNTGRGGGAGDSPPPPVTCVVASELMSFALDVAAELGVAAYMLWGTSACGLAVRELRRRGYVPLKETQVNAGAHNPLAPYEHL

SEQ ID NO: 82 - protein, 502 aa, Oryza sativa
MCDSPSSSSCSSLSLALAMGERMRRAAHAMLFPFPCSGHINPTLKLAELLHSRGVHVTFVNTEHNHERLLRRRGGGGALRGREGFRFEAVPDGLRDDERAAPDSTVRLYLSLRRSCGAPLVEVARRVASGGGVPPVTCVVLSGLVSFALDVAEELGVPAFVLWGTSACGFACTLRLRQLRQRGYTPLKDESYLTNGYLDTPIDWIAGVPTVRLGDVSSFVRTLDPTSFALRVEEDEANSCARAQGLILNTFDDLESDVLDALRDEFPRVYTVGPLAADRANGGLSLWEEDAACMAWLDAQPAGSVLYVSFGSLTVMSPEELAELAWGLADTRRTFLWVIRPGLIAGAGAGDHDVVTNALPDGFVAETKGRCFIAEWCAQEEVLRHRAVGGFLTHSGWNSTTESICAGVPMICWPGFADQYINSRYVRDEWGIGLRLDEELRREQVAAHVEKLMGGGGGGGDRGKEMRRNAARWKAAAEAATAKGGSSYGGLDKLVEQLRLGQ

SEQ ID NO: 83 - protein, 460 aa, Oryza sativa
MAKGHAMPLLHLTRLLLARGLASKVTFFTTPRDAPFIRASLAGAGAAAVVELPFPTDDGLNDGAAPPQSMDDELASPSQLADVVAASAALRPAFAAAFARLEPRPDVLVHDGFLPWAELAAADAGGVPRLVSYGMSAFATYVAGAVTAHKPHARVGSPSEPFEVDGLPGLRLTRADLNPPIDEPEPTGPLWDLACETKASMDSSEGIIVNSFVELEPLCFDGWSRMSPVKLWPVGPLCLASELGRNMDRDVSDWLDSRLAMDRPVLYVAFGSQADLSRTQLEEIALGLDQSGLDFLWVVRSKWFDSEDHFENRFGDKGKVYQGFIDQVGVLSHKSIKGFFSHCGWNSVLESISMGVPILAFPMAAEQKLNAKFVVDMLRVGLRVWPQKREDDMENGLVAREEVQVMARELIFGEEGKWASTRVSELAVLSKKAMEIGGSSYKKLEEMVHEISELTRDKSM

SEQ ID NO: 84 - protein, 134 aa, Oryza sativa
MVIRGWAPQLAALRHRAVGWFVTHSGWISVVEAVAAGVAMLTWPMVADQFVNARLVVDELRAAVPVSWGGVAVPPSANEVARVLEATVLAADGGEVGARVEELAVEAAAATREGGSSWVEVDELVRELGGHMQR

SEQ ID NO: 85 - protein, 323 aa, Oryza sativa
MMSLCSYFPIYLDNKDAQADVGDVDVPGVRHLQRSWLPQPLLDLDMLFTKQFIENGREVVKTDGVLINTFDALEPVALAALRDGTVVRGFPPVFAVGPYSSLASEKKAADADQSSALAWLDQQPARSVVYVAFGNRCTVSNDQLREIAAGLEASGCRFLWILKTTVVDRDEAAAGGVRDVLGDGFMERVKGRGMVTKEWVDQEAVLGHPAVGLFLSHSGWNSVTEAAAAGVPLLAWPRGGDHRVAATVVASSGVGVWMEQWSWDGEEWLVSGEEIGGKVKEMMADDAVRERAAKVGEEAAKAVAEGGTSHTSMLEFVAKLKAA

SEQ ID NO: 86 - protein, 477 aa, Oryza sativa
MAAARRVVLFPSLGVGHLAPMLELAAVCIRHGLAVTVAVPDPATTAPAFSAALRKYASRLPSLSVHPLPPPPHPPASSGADAAAHPLLRMLAVLRAHAPALGDLLRGPHAARALVADMFSVYALDVAAELGVPGYLLFCTGATNLAVFLRLPRFCAGSSGSLRELGDAPVSFPGVRPLPASHLPEEVLDRGTDISAAMLDAFDRMADARGILVNTFDALEGPGVAALRDGRCLSNRATPPVYCVGPLITDGGAEEERHPCLAWLDAQPERSVVFLCFGSRGALSPEQVSEMATGLERSEQRFLWALRAPAGTKPDAAMSLLPDGFLARTADRGVVVTASWVPQVAVLQHASTGAFVTHCGWNSTLEAVAAGVPMVCWPLDAEQWMNKVFIVEEMKIGIEVRGYKPGALVQADIVDAILRRIMESDAQQGVLERVMAMKESAAAAWKEGGSSCTAFAEFLKDMEEGNVAMAHSNQVET

SEQ ID NO: 87 - protein, 503 aa, Oryza sativa
MAASASSSSPLHIVMFPWLAFGHMIPFLELAKRLARRGLAVTFVSTPRNAARLGAIPPALSAHLRVVPLDLPAVDGLPEGAESTADAPPEKVGLLKKAFDGLAAPFAGFVAEACAAGHGESTPTAAGFSRKPDWIILDFAQNWVWPIAEEHKIPCAMFSIFPAAMVAFVGPRQENLAHPRTKTEHFMVQPPWIPFPSNVAYRRRHGAEWIAAVFRPNASGVSDADRFWEMEHACCRLIIHRSCPEAEPRLFPLLTELFAKPSVPAGLLMPPPPPAAGVDDDDDDVSMDDQHIAMAMRWLDEQPERSVIYVALGSEAPLTVGHVRELALGLELAGVRFLWALRAPPSASSVNRDKCAADADLLLPDGFRSRVAAARGGLVCARWVPQLRILAHRATGGFLTHCGWSSIFESLRFALPLVMLPLFADQGLGVQALPAREIGVEVACNDDGSFRRDAIAAAVRQVMVEEKGKALSRKAEELRDVLGDEGRQEMYLDELVGYLQRYK

SEQ ID NO: 88 - protein, 507 aa, Oryza sativa
MAATSDSTPAAAAAAAASSSSSPLHIVVFPWLAFGHMIPFLELSKRLASRGHAVTFVTTPRNAARLGATPPAPLSSSSRLRVVPLDLPAVDGLPEGAESTADVPPEKVGLLKKAFDGLAAPFARFVAEACAAGDGEAVTAAAGFLRKPDWIIPDFAHSWIWPIAEEHKIPYATFLIVPAALVAILGPRRENLTHPRTTAEDYMVQPPWIPFPSNIAYRRRHEAEWMVAAFRANASGVSDMDRFWESEQHPNCRLIIYRTCPEIEPRLFPLLTELYTKPAIPSGLLVPPALDDNDIGVYNRSDRSFVAVMQWLDKQPNKSVIYVSLGTEAPITADHMHELAFGLELAGVRFLWALRRPSGINCHDDMLLPSGFETRVAARGLVCTEWVPQVRMLAHGAVGVFLTHCGWGSTVESFHYGQPLVMLPFIADQGLIAQAVAATGVGVEVARNYDDGSFYRDDVAAAIQRVMVEEEGKELAHKAIELCGILGDRVQQEMYLYELIGYLQCYK

SEQ ID NO: 89 - protein, 283 aa, Oryza sativa
MKQSGSLLHSSLTPLECPMLTVCWKWNAPAAALSSCPEAEPRLFPLLNKLFARPAVPASLLLPADIVHDEDAPNTTSNQSFVSAIQWLDKQPNGSVIYVALGSEAPITTNHVRELALGLELSGVRFLWALRPPSGINSQTGTFLPSGFESRVATRGIVCTEWVPQVRVLAHGAIGAFLTHCGWGSTVESFCFGHPLVMLPFVADQGLIAQAMAARGIGVEVARNYDDGSFYRDDVAAAVRRVMVEEEGKVLARKAKEVHSILGDRAREEQYLDEFVGYLQRYK

SEQ ID NO: 90 - protein, 499 aa, Oryza sativa
MAINGVAGAGAGDVDVDVDVDASAPPPPLHLVMFPWLAFGHLIPFLQLAKRLAARGHAAVTFLATPRNASRLAALPPELAAYVRVVSLPLPVLDGLPEGAESTADVPPEKVELLKKAFDGLAAPFAAFLADACAAGDREGRPDPFSRRPDWVVVDFAHGWLPPIADEHRVPCAFFSIYSAAALAFLGPKAAHDAHPRTEPEDFMSPPPWITFPSTIAFRRHEAAWVAAAAYRPNASGVSDIDRMWQLHQRCHLIVYRSCPDVEGAQLCGLLDELYHKPVVPAGLLLPPDAAGDDDDGHRPDLMRWLDEQPARSVVYVALGTEAPVTADNVRELALGLELAGARFLWALRDAGERLPEGYKARVAGRSVVEAGWVPQVRVLAHAAVGAFLTHCGWGSTVESLRFGGLPLVMLPFIADQGLIARAMADRGLGVEVARDDDGDGSFRGEDVAAAVRRVMAEEEGKVFARNAREMQEALGDGERQDRYVDELAERLRRRRSLS

SEQ ID NO: 91 - protein, 198 aa, Oryza sativa
MASASVVGGGARHGGERRRRVLVFPLPFQGHTNPMLQLAGALHGRGGLCVTVLHTRFNALDPSRHPELAFVEVADGIPPDVAARGRVAEIILAMNAAMEATEDESGAASPSNIREVLASVVAAGEGQPSVACLVIDSHLLAVQKAAAGLGIPTLVLRTGSAACLRCYLAYDMLLQKAICLPKVRTKQSHIFIHPRLKL

SEQ ID NO: 92 - protein, 458 aa, Oryza sativa
MATQEREPERQPHAGRRVALFPLPFQGHLSPMLQLADLLRARGLAVTVLHTRSNAPDPARHRHGPDLAFLPIHEAALPEEATSPGADIVAQLLALNAACEAPFRDALASLLPGVACAVVDGQWYAALGAAARLGVPALALRTDSAATFRSMLAFPRLRDAGFIPIQGERLDEAVPELEPLRVRDLIRVDGCETEALCGFIARVADAMRDSASGVVVNTFDAIEASELGKIEAELSKPTFAVGPLHKLTTARTAAEQYRHFVRLYGPDRACLAWLDAHPPRSVLYVSLGSVACIDHDMFDEMAWGLAASGVPFLWVNRPGSVRGCMPALPYGVDVSRGKIVPWAPQRDVLAHPAIGGFWTHCGWNSTLESVCEGVPMLARPCFADQTVNARYVTHQWGVGLELGEVFDRDRVAVAVRKLMVGEEGAAMRETARRLKIQANQCVAATLAIDNLVKYICSL

SEQ ID NO: 93 - protein, 405 aa, Oryza sativa
MTGARRHCRRVVMFPFPFRSHIAPMLQLAELLRGRGLAVTVVRTTFNAPDAARHPELIFVPIHERLPDAATDPGTDLVEQMLALNAACEAPFREALRRVWYWYAALTAAAEVGVAALALRTDNAAALHCMLSYSRLRYSGYLPIKGKLFPESRDEVLPPVEPLRGRDLIRVDGGDAERVREFIARVDNAMRTAAMGFVINTFRAIEKPVLRNIRRHLPRIPAFAIGPMHRLLGAPEEHGLHAPDSGCVAWLHAHSPRSVLYVSLGSVARIDREVFDEMALGLAGSGVPFLWVIRPGFVTGIVSDALPLTEPLTAVVDNGMGKPCFGDQTVNARYVTHQWGVGLELGEVFDRDRVAEAVRKLMVGEEGAAMRDKARGLKAKASKSVEDDGASNAAIDRLVRYMVSF

SEQ ID NO: 94 - protein, 527 aa, Oryza sativa
MASPAASKPHVVLIPYPAQGHVTFVHTEFNRARLLRSRGAAAVAGADGLPPPGQPAELDATQDIWAICEATRRTGPGHVRALVERLGREAAAGGVPPVSFVVADGAMGFAVHVTKEMGIPTYLFFTHSACGLLAYLNFDQLVKRGYVPLKYESCLTNGYLDTRLDWVAGMIAGVRLRDLPTFIRTTDPDDVMLNITMKQCELDAPAADGILLNTFDGLERAALDAIRARLPNTIAREDGRCAAWLDAHADAAVVYANFGSITVMGRAQVGEFARGLAAAGAPFLWVIRPDMVRDAGDGDGEPLLPEGFEEEVVASGSGRGLMVGWCDQEAVLGHRATGAFLSHCGWNSTVESLAAGVPMLCWPFFSEQVTNCRYACEEWGVGVEMARDAGRREVEAAVREVMGGGEKAAAMRRKAAAAVAPGGSSRRNLESLFAEIAGGVQPIGLCQFIRGNCDIVGVKNGNEDKSILEIDKVTTVASLSTGTLPTTESTEPLNLGKFRTGASLSTDIHIAKWDICRFGFMGRAASV

SEQ ID NO: 95 - protein, 217 aa, Oryza sativa
MARPHAVVVPYPGSGNINPALQLAKLLHGHGIYITFVNTEHNHRRALAAEGAAAVRGRDGFQFETIPDGLLDADRDAADYDLGLSVATSHRCAAPLRDLVARLNGAAAGSADGGGGAPPVTCMVLTALMSFALDVARGLGLPTMVLWGGSAASLMAHMRIRELRERGYIPLKASGSDQFFRLLLKPEETMSVEKSVQYNQASDQFIFMNNNGLKNDK

SEQ ID NO: 96 - protein, 177 aa, Oryza sativa
MARPHAVVVPYPGSGNINPALQLAKLLHGHGVYITFVNTEHNHRRIVAAEGAGAVRGRDGFRFEAIPDGMADADHDIGNYDLALSAATSNRCAAPLRELLARLDDGGAGAPPVTCVVVTALMSFALYVARELGLPTMVLWGSSAAALVTQMRTRELRERGYIPLKGNEIKDDRDRTV

SEQ ID NO: 97 - protein, 395 aa, Oryza sativa
MSSSLSLLLLPPSLSLPSLFLSRGAIGRQGQRRRQRARAGAASGKQRRQRAAETWSWRGSPRAAEMQEWHDVVDDDGGAQPLADESLLTNGHLDTTIIDWIPGMPPISLGDISSFVRTTDADDFGLRFNEDEANNCTMAGALVLNTFDGLEADVLAALRAEYPRIFTVGPLGNLLLNAAADDVAGLSLWKQDTECLAWLDAQEMGAVVYVNFGSLTVLTPQQLAEFAWGLAATGRPFLWVIRENLVVPGDGGGDALLPTGFAAATEGRRCVATWCPQDRVLRHRAVGCFVTHSGWNSTCEGVAAGVPMVCWPVFADQYTNCKYACEAWGVGVRLDAEVRREQVAGHVELAMESEEMRRAAARWKAQAEAAARRGGSSYENLQSMVEVINSFSSKA

SEQ ID NO: 98 - protein, 259 aa, Oryza sativa
MPPIKLGDMSSFVRTTDPDDFGLRFNEEEANNCTKANALILNTFDELEADVLAALRAEYARIYTIGPLGTLLNHAADAIGGGLSLWKQDTECLAWLDTQQPRSAVENLVPGGPNALPPEFVVETDGRRCLATWCSQEQVLRHPAVGCFLTHSGWNSKCESVASGVPMVCWPVFADQYINRKYACESWDVGLRLDEEVRREQVTAQVKQVMESEEMRQDAARWKAKAEQAARLGGSSYKNLQSVVEVIRSFASDSKKAEA

SEQ ID NO: 99 - protein, 106 aa, Oryza sativa
MTHIWWASVMEGVSSGVPMVCRPFFGNQKMNALLVSHVWGFGMAFDRVMTCDGVATVVVSLVGGKDGCRMRARAQELQAKVATMFIEPNGNCRKNFARLVEIICAS

SEQ ID NO: 100 - protein, 206 aa, Oryza sativa
MSALRPRLEASLAAARPRVGLLVADALLYWAHDAAAGLGVPTVAFYATSMFAHVIRDVILRDNPAAALVAGGAGATFAVPEFPHVRLTLTDIPVPFNDPSPAGPLIEMDAKMANAIAAHYIEHWDCHHVGHRAWPVGPLCLARQPCRAAGDSAAAIKPSWMRWLDEMAAAGRAVLYVALGTLNAEPHAQLRELAGGLEASGVDFLW

SEQ ID NO: 101 - protein, 477 aa, Oryza sativa
MKKTVVLYPGLAVGHFNPMMVLADVFLDHGYAVAVALINPSVKDDDAAFTAAVARAVSSKSSATVSFHMLPRIPDPPSLAFDDDKFFTNYFDLVRRYDEHLHDFLCSVQGLHAVVVDASCGFAIQAVRKLGVPAYELYPCDAGALAVNIQIPSLLAGFKKLGGGEEGSAPLELLGVPPMSASHVTDLFGRSLSELISKDPEATTVAAGARVMAEFDGILINTFVSLEERALRALADPRCCPDGVVLPPVYAVGPLVDKAAAGAGDETSRRHESLVWLDGQPDRSIVFLCFGSIGGNHAEQQLREIAAGLDKSGHRFLWVVRRAPSTEHLDALLPEGFLARTSGRGLVVNTWVPQPSVLRHRATAAFVTHCGWNSVLEGITAGVPMLCWPMYAEQRINKVLMVDDMGVGVEMEGWLEGWVTAEEVEAKVRLVVESEHGRKLRERVEAHRDGAAMAWKDGGSSRVAFARLMTELDNAQR

SEQ ID NO: 102 - protein, 409 aa, Oryza sativa
MMPRRPTRRRASPRPTLPSRSASCRRRPRPARTPARTVSGAASTRSGSPTRCSWSSSARCRPLSTRSCSTCSASTRSTSRPSSPSPHTSSSPPRQAPSPSSSTSRITTPTGRHSGRWDKESETTKIRLYQFKRMMEGKGVLVNSFDWLEPKALKALAAGVCVPDKPTPSVYCVGPLVDTGNKVGSGAERRHACLVWLDAQPRRSVVFLSFGSQGALPAAQLKEIARGLESSGHRFLWVVRSPPEEQATSPEPDLERLLPAGFLERTKGTGMVAKNWAPQAEVVQHEAVGVFVTHCGWNSTLEAIMSALPMICWPLYAEQAMNKVIMVEEMKIAVPLDGYEEGGLVKAEEVEAKVRLVMETEEGRKLREKLVETRDMALDAVKEGGSSEVAFDEFMRDLEKSSLENGVCS

SEQ ID NO: 103 - protein, 528 aa, Oryza sativa
MAAASAAKELHFLLVPLVAQGHIIPMVDLARLLAGRGARVTVVTTPVNAARNRAAVEGARRGGLAVELAEITFTGPEFGLPEGVENMDQLVDIAMYLAFFKAVWNMEAALEAYVRALPRRPDCVVADACNPWTAAVCERLAIPRLVLHCPSVYFLLAIHCLAKHGVYDRVADQLEPFEVPGFPVRAVVNTATCRGFFQWPGAEKLARDVVDGEATADGLLLNTFRDVEGVFVDAYASALGLRAWAIGPTCAARLDDADSSASRGNRAVVDAARIVSWLDARPPASVLYVSFGSLTHLRATQAIELARGLEESGWPFVWAIKEATAAAVSEWLDGEGYEERVSDRGLLVRGWAPQVTILSHPAAGGFLTHCGWNATLEAISHGVPALTWPNFSDQFSSEQLLVDVLRVGVRSGVTVPPMFLPAEAEGVQLTSDGVVKAVTELMDGGDEGTARRARAKELAAKARAAMEEGGSSHADLTDVIGYVSEFSAKKRQERDAGETAQQPPPSPAELGDISGDKVEADPALSVQS

SEQ ID NO: 104 - protein, 271 aa, Oryza sativa
MLAVCRHLVAADAALSVTVVVTEEWHALLESAGVPAALPDRISFATIPNVIPSEHGRGADHIGFIVAVHTRMAAAVEWLLDRLLLEQKWRPDAIVADTYLAWGVAVGARRGIPVCSLWTMAATFFWALYHFNLWPPVDGSESEQELSCRSLEQYVPGLSSVRLSDIKTFRASWERPMKIAEEALVNVRKAQCILFTSFHELEPEIINRIAETVPCPIYPIGPSIPHLPRNGDDPGKIGNDDHHSWLDARQENSVLYVSFGSYVTSESNHKN

SEQ ID NO: 105 - protein, 485 aa, Oryza sativa
MAAAAAAAADHDAAPRAHALILPYPAQGHVIPLMELAYCLIDRGFAVTFVNTEHNHRRVVAAAAGAGGVQAPGSRARRLRLVAVADGMGDGDDRDNLVRLNAVMEEAIPPQLEPILDGAGGEGQLGKVTCVVVDVGMSWALDAVKRRGLPGAALWAASAAVLAVLLGAQKLIRDGVIDDDGAPLKLENNSFRLSEFTPPMDATFLAWNFMGNRDAERMVFHYLTSSARAAAAKADILLCNSFVELEPAIFTLKSPATILPIGPLRTGQRFAHQVEVVGHFWQTNDDTCLSFLDEQPYGSVVYVAFGSLTIMSPGQLKELALGLEASGHPFLWVVRPGLAGNLPTSFLDATMGQGKGIVVEWAPQEQVLAHPAVGCFVTHCGWNSTVESIRNGVPMLCWPYFTDQFTNQIYICDIWRIGLKMVQTCGEGIVTKEIMVERLKELLLDEGIKERVQRLKEFAETNMSEEGESTSNLNAVVELMTRPMS

SEQ ID NO: 106 - protein, 253 aa, Oryza sativa
MGQQQPQDAVAANGNGGGKRPHAVVIPYPLQGHVIPAVHLALRLAARGFAVTFVNTESVHRQITSSGGGHGVGGGDDIFAGAGGGAMIRYELVSDGFPLGFDRSRNHDQYMEGVLHVLPAHVDELLRRVVGDGDAAAATCLVADTFFVWPATLARKLGVPYVSFWTEPAIIFSLYYHMDLLTKNGHFNCKAAPSSSSLPSPILPHASILDADSIPRILSLTGDSMEVDEVMGSSESEKSARRDAVTVARLMLS

SEQ ID NO: 107 - protein, 405 aa, Oryza sativa
MAAASGEKEEEEKKLQERAPIRRTAWMLANFVVLFLLLALLVRRATAADAEERGVGGAAWRVAFACEAWFAFVWLLNMNAKWSPARFDTYPENLAGRCGAAHRPRKSSCISGHLDLMRRQCALMQDRRAAGGRHVRDDGGPGARAAGGDGEQGALAARRRLLPGRRRRRRRRRLACYVSDDGCSPVTYYALREAAGFARTWVPFCRRHGVAVRAPFRYFASAPEFGPADRKFLDDWTFMKSEYDKLVRRIEDADETTLLRQGGGEFAEFMDAKRTNHRAIVKVIWDNNSKNRIGEEGGFPHLIYVSREKSPGHHHHYKAGAMNALTRVSAVMTNAPIMLNVDCDMFANDPQVVLHAMCLLLGFDDEISSGFVQVPQSFYGDLKDDPFGNKLEVIYKKLLGGVAGI

SEQ ID NO: 108 - protein, 860 aa, Oryza sativa
MDGESPEIMPVECPDPEPASSESGDDHDIPEPLSSRLSVPSGELNLYRAAVALRLVLLAAFFRYRVTRPVADAHALWVTSVACELWLAASWLIAQLPKLSPANRVTYLDRLASRYEKGGEASRLAGVDVFVAAADAAREPPLATANTVLSVLAADYPAGGVACYVHDDGADMLVFESLFEAAGFARRWIPFCRRHGVEPRAPELYFARGVDYLRDRAAPSFVKDRRAMKREYEEFKVRMNHLAARARKVPEEGWIMSDGTPWPGNNSRDHPAMIQVLLGHPGDRDVDGGELPRLFYVSREKRPGFRHHGKAGAMNALLRVSAVLTNGAYVLNLDCDHCVNNSSALREAMCFMMDPVAGNRTCFVQFALRDSGGGDSVFFDIEMKCLDGIQGPVYVGSGCCFSRKALYGFEPAAAADDGDDMDTAADWRRMCCFGRGKRMNAMRRSMSAVPLLDSEDDSDEQEEEEAAGRRRRLRAYRAALERHFGQSPAFIASAFEEQGRRRGGDGGSPDATVAPARSLLKEAIHVVSCAFEERTRWGKEIGWMYGGGVATGFRMHARGWSSAYCSPARPAFRRYARASPADVLAGASRRAVAAMGILLSRRHSPVWAGRRLGLLQRLGYVARASYPLASLPLTVYCALPAVCLLTGKSTFPSDVSYYDGVLLILLLFSVAASVALELRWSRVPLRAWWRDEKLWMVTATSASLAAVFQGILSACTGIDVAFSTETAASPPKRPAAGNDDGEEEAALASEITMRWTNLLVAPTSVVVANLAGVVAAVAYGVDHGYYQSWGALGAKLALAGWVVAHLQGFLRGLLAPRDRAPPTIAVLWSVVFVSVASLLWVHAASFSAPTAAPTTEQPIL

SEQ ID NO: 109 - protein, 884 aa, Oryza sativa
MALSPAAAGRTGRNNNNDAGLADPLLPAGGGGGGGKDKYWVPADEEEEICRGEDGGRPPAPPLLYRTFKVSGVLLHPYRLLTLVRLIAVVLFLAWRLKHRDSDAMWLWWISIAGDFWFGVTWLLNQASKLNPVKRVPDLSLLRRRFDDGGLPGIDVFINTVDPVDEPMLYTMNSILSILATDYPADRHAAYLSDDGASLAHYEGLIETARFAALWVPFCRKHRVEPRAPESYFAAKAAPYAGPALPEEFFGDRRLVRREYEEFKARLDALFTDIPQRSEASVGNANTKGAKATLMADGTPWPGTWTEPAENHKKGQHAGIVKVMLSHPGEEPQLGMPASSGHPLDFSAVDVRLPILVYIAREKRPGYDHQKKAGAMNAQLRVSALLSNAPFIFNFDGDHYINNSQAFRAALCFMLDCRHGDDTAFVQFPQRFDDVDPTDRYCNHNRVFFDATLLGLNGVQGPSYVGTGCMFRRVALYGADPPRWRPEDDDAKALGCPGRYGNSMPFINTIPAAASQERSIASPAAASLDETAAMAEVEEVMTCAYEDGTEWGDGVGWVYDIATEDVVTGFRLHRKGWRSMYCAMEPDAFRGTAPINLTERLYQILRWSGGSLEMFFSRNCPLLAGCRLRPMQRVAYANMTAYPVSALFMVVYDLLPVIWLSHHGEFHIQKPFSTYVAYLVAVIAMIEVIGLVEIKWAGLTLLDWWRNEQFYMIGATGVYLAAVLHIVLKRLLGLKGVRFKLTAKQLAGGARERFAELYDVHWSPLLAPTVVVMAVNVTAIGAAAGKAVVGGWTPAQVAGASAGLVFNVWVLVLLYPFALGIMGRWSKRPCALFALLVAACAAVAAGFVAVHAVLAAGSAAPSWLGWSRGATAILPSSWRLKRGF

SEQ ID NO: 110 - protein, 224 aa, Oryza sativa
MSMAGDVWFGFSWVLNQLPKLSPIKRFPDLAALADRHSDELPGVDVFVTTVDPVDEPILYTVNTILSILAADYPVDSSRRKSLAKAISEKAANEVEVASASPQMAAHFGYRRESQMGRESVVYIGGTQETGGRPPEKLESILGCYFFSFFLTDIYGSHVCHVRQNHYLNSEGLDLLRFSKMEEVLYPVLQLRETLWEDDMGHRGERTGGIRGGRGVGQAASTRR

SEQ ID NO: 111 - protein, 889 aa, Oryza sativa
MAATAASTMSAAAAVTRRINAALRVDATSGDVAAGADGQNGRRSPVAKRVNDGGGGKDDVWVAVDEKDVCGARGGDGAARPPLFRTYKVKGSILHPYRFLILLRLIAIVAFFAWRVRHKNRDGVWLWTMSMVGDVWFGFSWVLNQLPKLSPIKRVPDLAALADRHSGDLPGVDVFVTTVDPVDEPILYTVNTILSILAADYPVDRYACYLSDDGGTLVHYEAMVEVAKFAELWVPFCRKHCVEPRSPENYFAMKTQAYKGGVPGELMSDHRRVRREYEEFKVRIDSLSSTIRQRSDVYNAKHAGENATWMADGTHWPGTWFEPADNHQRGKHAGIVQVLLNHPSCKPRLGLAASAENPVDFSGVDVRLPMLVYISREKRPGYNHQKKAGAMNVMLRVSALLSNAPFVINFDGDHYVNNSQAFRAPMCFMLDGRGRGGENTAFVQFPQRFDDVDPTDRYANHNRVFFDGTMLSLNGLQGPSYLGTGTMFRRVALYGVEPPRWGAAASQIKAMDIANKFGSSTSFVGTMLDGANQERSITPLAVLDESVAGDLAALTACAYEDGTSWGRDVGWVYNIATEDVVTGFRMHRQGWRSVYASVEPAAFRGTAPINLTERLYQILRWSGGSLEMFFSHSNALLAGRRLHPLQRVAYLNMSTYPIVTVFIFFYNLFPVMWLISEQYYIQRPFGEYLLYLVAVIAMIHVIGMFEVKWAGITLLDWCRNEQFYMIGSTGVYPTAVLYMALKLVTGKGIYFRLTSKQTTASSGDKFADLYTVRWVPLLIPTIVIIVVNVAAVGVAVGKAAAWGPLTEPGWLAVLGMVFNVWILVLLYPFALGVMGQWGKRPAVLFVAMAMAVAAVAAMYVAFGAPYQAELSGGAASLGKAAASLTGPSG

SEQ ID NO: 112 - protein, 860 aa, Oryza sativa
MSAAAAVTSWTNGCWSPAATRVNDGGKDDVWVAVDEADVSGARGSDGGGRPPLFQTYKVKGSILHPYRFLILARLIAIVAFFAWRIRHKNRDGAWLWTMSMVGDVWFGFSWVLNQLPKQSPIKRVPDIAALADRHSGDLPGVDVFVTTVDPVDEPILYTVNTILSILAADYPVDRYACYLSDDGGTLVHYEAMVEVAKFAELWVPFCRKHCVEPRSPENYFAMKTQAYKGGVPGELMSDHRRVRREYEEFKVRIDSLSSTIRQRSDVYNAKHAGENATWMADGTHWPGTWFEPADNHQRGKHAGIVQVLLNHPSCKPRLGLAASAENPVDFSGVDVRLPMLVYISREKRPGYNHQKKAGAMNVMLRVSALLSNAPFVINFDGDHYVNNSQAFRAPMCFMLDGRGRGGENTAFVQFPQRFDDVDPTDRYANHNRVFFDGTMLSLNGLQGPSYLGTGTMFRRVALYGVEPPRWGAAASQIKAMDIANKFGSSTSFVGTMLDGANQERSITPLAVLDESVAGDLAALTACAYEDGTSWGRDVGWVYNIATEDVVTGFRMHRQGWRSVYASVEPAAFRGTAPINLTERLYQILRWSGGSLEMFFSHSNALLAGRRLHPLQRVAYLNMSTYPIVTVFIFFYNLFPVMWLISEQYYIQRPFGEYLLYLVAVIAMIHVIGMFEVKWAGITLLDWCRNEQFYMIGSTGVYPTAVLYMALKLVTGKGIYFRLTSKQTAASSGDKFADLYTVRWVPLLIPTIVIMVVNVAAVGVAVGKAAAWGPLTEPGWLAVLGMVFNVWILVLLYPFALGVMGQWGKRPAVLFVAMAMAVAAVAAMYVAFGAPYQAELSGVAASLGKVAAASLTGPSG

SEQ ID NO: 113 - protein, 889 aa, Oryza sativa
MSAAAVTRRINAGGLRVEVTNGNGAAGVYVAAAAAPCSPAAKRVNDGGGKDDVWVAVDEADVSGPSGGDGVRPTLFRTYKVKGSILHPYRFLILVRLIAIVAFFAWRVRHKNRDGAWLWTMSMAGDVWFGFSWALNQLPKLNPIKRVADLAALADRQQHGTSGGGELPGVDVFVTTVDPVDEPILYTVNSILSILAADYPVDRYACYLSDDGGTLVHYEAMVEVAKFAELWVPFCRKHCVEPRAPESYFAMKTQAYRGGVAGELMSDRRRVRREYEEFKVRIDSLFSTIRKRSDAYNRAKDGKDDGENATWMADGTHWPGTWFEPAENHRKGQHAGIVQVLLNHPTSKPRFGVAASVDNPLDFSGVDVRLPMLVYISREKRPGYNHQKKAGAMNALLRVSALLSNAPFIINFDCDHYVNNSQAFRAPMCFMLDRRGGGDDVAFVQFPQRFDDVDPTDRYANHNRVFFDGTTLSLNGLQGPSYLGTGTMFRRAALYGLEPPRWGAAGSQIKAMDNANKFGASSTLVSSMLDGANQERSITPPVAIDGSVARDLAAVTACGYDLGTSWGRDAGWVYDIATEDVATGFRMHQQGWRSVYTSMEPAAFRGTAPINLTERLYQILRWSGGSLEMFFSHSNALLAGRRLHPLQRIAYLNMSTYPIVTVFIFFYNLFPVMWLISEQYYIQQPFGEYLLYLVAIIAMIHVIGMFEVKWSGITVLDWCRNEQFYMIGSTGVYPTAVLYMALKLFTGKGIHFRLTSKQTTASSGDKFADLYTVRWVPLLIPTIVVLAVNVGAVGVAVGKAAAWGLLTEQGRFAVLGMVFNVWILALLYPFALGIMGQRGKRPAVLFVATVMAVAAVAIMYAAFGAPYQAGLSGVAASLGKAASLTGPSG

SEQ ID NO: 114 - protein, 868 aa, Oryza sativa
MASPASVAGGGEDSNGCSSLIDPLLVSRTSSIGGAERKAAGGGGGGAKGKHWAAADKGERRAAKECGGEDGRRPLLFRSYRVKGSLLHPYRALIFARLIAVLLFFGWRIRHNNSDIMWFWTMSVAGDVWFGFSWLLNQLPKFNPVKTIPDLTALRQYCDLADGSYRLPGIDVFVTTADPIDEPVLYTMNCVLSILAADYPVDRSACYLSDDSGALILYEALVETAKFATLWVPFCRKHCIEPRSPESYFELEAPSYTGSAPEEFKNDSRIVHLEYDEFKVRLEALPETIRKRSDVYNSMKTDQGAPNATWMANGTQWPGTWIEPIENHRKGHHAGIVKVVLDHPIRGHNLSLKDSTGNNLNFNATDVRIPMLVYVSRGKNPNYDHNKKAGALNAQLRASALLSNAQFIINFDCDHYINNSQAFRAAICFMLDQREGDNTAFVQFPQRFDNVDPKDRYGNHNRVFFDGTMLALNGLQGPSYLGTGCMFRRLALYGIDPPHWRQDNITPEASKFGNSILLLESVLEALNQDRFATPSPVNDIFVNELEMVVSASFDKETDWGKGVGYIYDIATEDIVTGFRIHGQGWRSMYCTMEHDAFCGTAPINLTERLHQIVRWSGGSLEMFFSHNNPLIGGRRLQPLQRVSYLNMTIYPVTSLFILLYAISPVMWLIPDEVYIQRPFTRYVVYLLVIILMIHMIGWLEIKWAGITWLDYWRNEQFFMIGSTSAYPTAVLHMVVNLLTKKGIHFRVTSKQTTADTNDKFADLYEMRWVPMLIPTMVVLVANIGAIGVAIGKTAVYMGVWTIAQKRHAAMGLLFNMWVMFLLYPFALAIMGRWAKRSIILVVLLPIIFVIVALVYVATHILLANIIPF

SEQ ID NO: 115 - protein, 830 aa, Oryza sativa
MPPSAGLATESLPAATCPAKKDAYAAAASPESETKLAAGDERAPLVRTTRISTTTIKLYRLTIFVRIAIFVLFFKWRITYAARAISSTDAGGIGMSKAATFWTASIAGELWFAFMWVLDQLPKTMPVRRAVDVTALNDDTLLPAMDVFVTTADPDKEPPLATANTVLSILAAGYPAGKVTCYVSDDAGAEVTRGAVVEAARFAALWVPFCRKHGVEPRNPEAYFNGGEGGGGGGKARVVARGSYKGRAWPELVRDRRRVRREYEEMRLRIDALQAADARRRRCGAADDHAGVVQVLIDSAGSAPQLGVADGSKLIDLASVDVRLPALVYVCREKRRGRAHHRKAGAMNALLRASAVLSNAPFILNLDCDHYVNNSQALRAGICFMIERRGGGAEDAGDVAFVQFPQRFDGVDPGDRYANHNRVFFDCTELGLDGLQGPIYVGTGCLFRRVALYGVDPPRWRSPGGGVAADPAKFGESAPFLASVRAEQSHSRDDGDAIAEASALVSCAYEDGTAWGRDVGWVYGTVTEDVATGFCMHRRGWRSAYYAAAPDAFRGTAPINLADRLHQVLRWAAGSLEIFFSRNNALLAGGRRRLHPLQRAAYLNTTVYPFTSLFLMAYCLFPAIPLIAGGGGWNAAPTPTYVAFLAALMVTLAAVAVLETRWSGIALGEWWRNEQFWMVSATSAYLAAVAQVALKVATGKEISFKLTSKHLASSATPVAGKDRQYAELYAVRWTALMAPTAAALAVNVASMAAAGGGGRWWWWDAPSAAAAAAAALPVAFNVWVVVHLYPFALGLMGRRSKAVRPILFLFAVVAYLAVRFLCLLLQFHTA

SEQ ID NO: 116 - protein, 1127 aa, Oryza sativa
MASKGILKNGGKPPTAPSSAAPTVVFGRRTDSGRFISYSRDDLDSEISSVDFQDYHVHIPMTPDNQPMDPAAGDEQQYVSSSLFTGGFNSVTRAHVMEKQASSARATVSACMVQGCGSKIMRNGRGADILPCECDFKICVDCFTDAVKGGGGVCPGCKEPYKHAEWEEVVSASNHDAINRALSLPHGHGHGPKMERRLSLVKQNGGAPGEFDHNRWLFETKGTYGYGNAIWPEDDGVAGHPKELMSKPWRPLTRKLRIQAAVISPYRLLVLIRLVALGLFLMWRIKHQNEDAIWLWGMSIVCELWFALSWVLDQLPKLCPINRATDLSVLKDKFETPTPSNPTGKSDLPGIDIFVSTADPEKEPVLVTANTILSILAADYPVDKLACYVSDDGGALLTFEAMAEAASFANLWVPFCRKHEIEPRNPDSYFNLKRDPFKNKVKGDFVKDRRRVKREYDEFKVRVNGLPDAIRRRSDAYHAREEIQAMNLQREKMKAGGDEQQLEPIKIPKATWMADGTHWPGTWLQASPEHARGDHAGIIQVMLKPPSPSPSSSGGDMEKRVDLSGVDTRLPMLVYVSREKRPGYDHNKKAGAMNALVRASAIMSNGPFILNLDCDHYVYNSKAFREGMCFMMDRGGDRLCYVQFPQRFEGIDPSDRYANHNTVFFDVNMRALDGLQGPVYVGTGCLFRRIALYGFDPPRSKDHTTPWSCCLPRRRRTRSQPQPQEEEEETMALRMDMDGAMNMASFPKKFGNSSFLIDSIPVAEFQGRPLADHPSVKNGRPPGALTIPRETLDASIVAEAISVVSCWYEEKTEWGTRVGWIYGSVTEDVVTGYRMHNRGWKSVYCVTHRDAFRGTAPINLTDRLHQVLRWATGSVEIFFSRNNALFASSKMKVLQRIAYLNVGIYPFTSVFLIVYCFLPALSLFSGQFIVQTLNVTFLTYLLIITITLCLLAMLEIKWSGIALEEWWRNEQFWLIGGTSAHLAAVLQGLLKVIAGIEISFTLTSKQLGDDVDDEFAELYAVKWTSLMIPPLTIIMINLVAIAVGFSRTIYSTIPQWSKLLGGVFFSFWVLAHLYPFAKGLMGRRGRTPTIVYVWSGLVAITISLLWIAIKPPSAQANSQLGGSFSFP

SEQ ID NO: 117 - protein, 244 aa, Oryza sativa
MDVFVTTADPDGIAALDDDALLPAMDVFVTTADPDKEPPLATANTVLSIYPRRGLPRRQVVQVLIDSAGSVPQLGVADGSKLIDVASVDVCLPALVYVCREKRRGHAHHRKAGAMNAPFILDLDCDHYVNNSQALRAGICFMIERGGGGAAEDAVAVAFVQFPQRVDGVDPSDRYANHNRVFFDCTELGLDGLQGPIYVGTGCLFRRVALYSVDLPRWRPRRSLGCRLLGEDERLWSRLKQMVI

SEQ ID NO: 118 - protein, 549 aa, Oryza sativa
MEGQWGRWRLAAAAAASSSGDQIAAAWAVVRARAVAPVLQFAVWACMAMSVMLVLEVAYMSLVSLVAVKLLRRVPERRYKWEPITTGSGGVGGGDGEDEEAATGGREAAAFPMVLVQIPMYNEKEVYKLSIGAACALTWPPDRIIIQVLDDSTDPAIKDLVELECKDWARKEINIKYEIRDNRKGYKAGALKKGMEHIYTQQCDFVAIFDADFQPESDFLLKTIPFLVHNPKIGLVQTRWEFVNYDVCLMTRIQKMSLDYHFKVEQESGSSMHSFFGFNGTAGVWRVSAINEAGGWKDRTTVEDMDLAVRASLKGWQFLYVGDIRVKSELPSTFKAYRHQQHRWTCGAANLFRKMATEIAKNKGVSVWKKLHLLYSFFFVRRVVAPILTFLFYCVVIPLSVMVPEVSIPVWGMVYIPTAITIMNAIRNPGSIHLMPFWILFENVMAMHRMRAALTGLLETMNVNQWVVTEKVGDHVKDKLEVPLLEPLKPTDCVERIYIPELMVAFYLLVCASYDLVLGAKHYYLYIYLQAFAFIALGFGFAGTSTPCS

SEQ ID NO: 119 - protein, 574 aa, Oryza sativa
MEAGEAAGAVLFLLAAAVSLLAAVSTGALDFTYLVTVVGEGSSTSPGSGGGAWWREAWVGARSRAVAPALQVGVWACMVMSVMLVVEATYNSAVSVAARLVGWRPERWFKWEPLGGGAGAGDEEKGEAAAAAYPMVMVQIPMYNELEVYKLSIGAVCGLKWPKERLIIQVLDDSTDAFIKNLVELECEDWASKGLNIKYATRSGRKGFKAGALKKGMEWDYAKQCEYVAIFDADFQPEPDFLLRTVPFLMHNQNVALVQARWVFVNDRVSLLTRIQKTFLDYHFKAEQEAGSATFAFFSFNGTAGVWRTEAINDAGGWKDRTTVEDMDLAVRATLKGWKFIYLGDLRVKSELPSTYKAYCRQQFRWSCGGANLFRKMIWDVLVAKKVSSLKKIYILYSFFLVRRVVAPAVAFILYNVIIPVSVMIPELFLPIWGVAYIPTALLIVTAIRNPENLHTVPLWILFESVMSMHRLRAAVAGLLQLQEFNQWIVTKKVGNNAFDENNETPLLQKSRKRLINRVNLPEIGLSVFLIFCASYNLVFHGKNSFYINLYLQGLAFFLLGLNCVGTLPDHCCF

SEQ ID NO: 120 - protein, 457 aa, Oryza sativa
MVLVQIPMCNEKEVYQQSIAAVCNLDWPRSNFLVQVLDDSDDPTTQTLIREEVLKWQQNGARIVYRHRVLRDGYKAGNLKSAMSCSYVKDYEFVAIFDADFQPNPDFLKRTVPHFKDNDELGLVQARWSFVNKDENLLTRLQNINLCFHFEVEQQVNGIFLNFFGFNGTAGVWRIKALDDSGGWMERTTVEDMDIAVRAHLRGWKFIFLNDVECQCELPESYEAYRKQQHRWHSGPMQLFRLCLPDIIKCKIVFWKKANLIFLFFLLRKLILPFYSFTLFCIILPMTMFVPEAELPDWVVCYIPALMSLLNILPSPKSFPFIIPYLLFENTMSVTKFNAMISGLFQLGNAYEWVVTKKSGRSSEGDLISLAPKELKHQKTESAPNLDAIAKEQSAPRKDVKKKHNRIYKKELALSLLLLTAAARSLLSKQGIHFYFLLFQGISFLLVGLDLIGEQIE

SEQ ID NO: 121 - protein, 244 aa, Oryza sativa
MAAAGWPLSSSVADLLPASLSLTLLLASLVHPLPPSAPFLLRLLALLIPSPRPSRAQVVVVVLAAAAFFFEHIRKIGCTHSLERTEVSAAFFEDPNSLNKVRCPSIYDPAEKYISLIIPAYNEEHRLPEALTETLNYLKQRSAVEKSFTYEVLIVDDGSTDHTSKVAFEFVRKHKIDNVRVLLLGRNHGKGEAVRKGMLHSRGELLLMLDADGATKVTDLEKLEAQVCHKLNQNMFYKVLLCIL

SEQ ID NO: 122 - protein, 178 aa, Oryza sativa
MADDAGGGRREYSIIVPTYNERLNVALIVYLIFKHLPDVNFEIIVVDDGSPDGTQDIVKQLQQIYGENRVLLRARPRKLGLGTAYLHGLKHASGDFVVIMDADLSHHPKYLPSFIRKQKETGADVVTGTRYVQNGGVHGWNLMRKLTSRGANVLAQTLLQPGASDLTGSFRCYINGMS

SEQ ID NO: 123 - protein, 611 aa, Oryza sativa
MAMAGADGPTAGAAAAVRWRGGESLLLLLLRWPSSAELVAAWGAARASAVAPALAAASAACLALSAMLLADAVLMAAACFARRRPDRRYRATPLGAGAGADDDDDDEEAGRVAYPMVLVQIPMYNEREVYKLSIGAACGLSWPSDRLIVQVLDDSTDPTVKTWYDRLRKTLVQQAHPAQADMDVHQSTKRKNKELMTRVPILECDSNHGLASIISSYLIAVGLVELECKSWGNKGKNVKYEVRNTRKGYKAGALKEGLLRDYVQQCNYVAIFDADFQPEPDFLLRTIPYLVRNPQIGLVQAHWEFVNTSECLMTRIQKMTLHYHFKVEQEGGSSTFAFFGFNGTAGVWRISALEEAGGWKDRTTVEDMDLAVRAGLKGWKFVYLADVKVKSELPSNLKTYRHQQHRWTCGAANLFRKVGAEILFTKEVPFWWKFYLLYSFFFVRKVVAHVVPFMLYCVVIPFSVLIPEVTVPVWGVVYVPTTITLLHAIRNTSSIHFIPFWILFENVMSFHRTKAMFIGLLELGGVNEWVVTEKLGNGSNTKPASQILERPPCRFWDRWTMSEILFSIFLFFCATYNLAYGGDYYFVYIYLQAIAFLVVGIGFCGTISSNS

SEQ ID NO: 124 - protein, 686 aa, Oryza sativa
MAPWSGFWAASRPALAAAAAGGTPVVVKMDNPNWSISEIDADGGEFLAGGRRRGRGKNAKQITWVLLLKAHRAAGCLAWLASAAVALGAAARRRVAAGRTDDADAETPAPRSRLYAFIRASLLLSVFLLAVELAAHANGRGRVLAASVDSFHSSWVRFRAAYVAPPLQLLADACVVLFLVQSADRLVQCLGCLYIHLNRIKPKPISSPAAAAAALPDLEDPDAGDYYPMVLVQIPMCNEKEVYQQSIAAVCNLDWPRSNILVQVLDDSDDPITQSLIKEEVEKWRQNGARIVYRHRVLREGYKAGNLKSAMSCSYVKDYEYVAIFDADFQPYPDFLKRTVPHFKDNEELGLVQARWSFVNKDENLLTRLQNINLCFHFEVEQQVNGIFINFFGFNGTAGVWRIKALEDSGGWMERTTVEDMDIAVRAHLNGWKFVFLNDVECQCELPESYEAYRKQQHRWHSGPMQLFRLCLPDIIRCKIAFWKKANLIFLFFLLRKLILPFYSFTLFCIILPMTMFIPEAELPDWVVCYIPALMSFLNILPAPKSFPFIIPYLLFENTMSVTKFNAMISGLFQLGSAYEWVVTKKSGRSSEGDLIALAPKELKQQKILDLTAIKEQSMLKQSSPRNEAKKKYNRIYKKELALSLLLLTAAARSLLSKQGIHFYFLMFQGLSFLLVGLDLIGEDVK

SEQ ID NO: 125 - protein, 585 aa, Oryza sativa
MVEAGEIGGAAVFALAAAAALSAASSLGAVDFRRPLAAVGGGGAFEWDGVVPWLIGVLGGGDEAAAGGVSVGVAAWYEVWVRVRGGVIAPTLQVAVWVCMVMSVMLVVEATFNSAVSLGVKAIGWRPEWRFKWEPLAGADEEKGRGEYPMVMVQIPMYNELEVYKLSIGAACELKWPKDKLIVQVLDDSTDPFIKNLVELECESWASKGVNIKYVTRSSRKGFKAGALKKGMECDYTKQCEYIAIFDADFQPEPNFLLRTVPFLMHNPNVALVQARWAFVNDTTSLLTRVQKMFFDYHFKVEQEAGSATFAFFSFNGTAGVWRTTAINEAGGWKDRTTVEDMDLAVRASLNGWKFIYVGDIRVKSELPSTYGAYCRQQFRWACGGANLFRKIAMDVLVAKDISLLKKFYMLYSFFLVRRVVAPMVACVLYNIIVPLSVMIPELFIPIWGVAYIPMALLIITTIRNPRNLHIMPFWILFESVMTVLRMRAALTGLMELSGFNKWTVTKKIGSSVEDTQVPLLPKTRKRLRDRINLPEIGFSVFLIFCASYNLIFHGKTSYYFNLYLQGLAFLLLGFNFTGNFACCQ

SEQ ID NO: 126 - protein, 594 aa, Oryza sativa
MSSSGGGGVAEEVARLWGELPVRVVWAAVAAQWAAAAAAARAAVVVPAVRALVAVSLAMTVMILAEKLFVAAVCLAVRAFRLRPDRRYKWLPIGAAAAAASSEDDEESGLVAAAAAFPMVLVQIPMFNEREVYKLSIGAACSLDWPSDRVVIQVLDDSTDLVVKVFIVIYFTDISSRIIRSTSSLVIKDLVEKECQKWQGKGVNIKYEVRGNRKGYKAGALKEGLKHDYVKECEYIAMFDADFQPESDFLLRTVPFLVHNSEIALVQTRWKFVNANECLLTRFQEMSLDYHFKYEQEAGSSVYSFFGFNGTAGVWRIAAIDDAGGWKDRTTVEDMDLAVRATLQGWKFVYVGDVKVKSELPSTFKAYRFQQHRWSCGPANLFKKMMVEILENKKVSFWNKIHLWYDFFFVGKIAAHTVTFIYYCFVIPVSVWLPEIEIPLWGVVYVPTVITLCKAVGTPSSFHLVILWVLFENVMSLHRIKAAVTGILEAGRVNEWVVTEKLGDANKTKPDTNGSDAVKVIDVELTTPLIPKLKKRRTRFWDKYHYSEIFVGICIILSGFYDVLYAKKGYYIFLFIQGLAFLIVGFDYIGVCPP

SEQ ID NO: 127 - protein, 493 aa, Oryza sativa
MASLRAATGLPFSPRPACCRPPSSPGSRRGFVFPPRFAPGVFLFFPLDSAGGGGVARRRAYPRIEATARHGARKENPKVRNRRLQKKFNGTATKPRLSVFCSNRQLYAMLVDDHNKKILFYGSTLQKAICGDPPCGAVEAAGRIGEELIRACKELDITEISSYDRNGFARGEKMMAFEVPDLVELECIDWARKEINIKYEIRDNRKGYKAGALKKGMEHIYTQQCDFVAIFDADFQPESDFLLKIIPFLVHNPKIGLVQTRWEFVNYDVCLMTRIQKMSLDYHFKVEQESGSSMHSFFGFNGTAAVWRVSATINEAGGWKDHTTVEDMDLAVRLLRVNSQVPSKPTDIGSIDGLVGVSVWKKLHLLYSFFFVRRVVAPILTFLFYRVVIPLSVMVPEISIPVWGMILFENVMAMHRMRAALTGLLETMNVNQWVVTEKVGDHVKDKLEVPLLEPLKPTDCVERIYIPELVVAFYLLEGFSGRNATGVNRSKDV

SEQ ID NO: 128 - protein, 493 aa, Oryza sativa; identical to SEQ ID NO: 127

SEQ ID NO: 129 - protein, 541 aa, Oryza sativa
MMSGGLAWAWRAVRCGVVLPTLQLAVYVCVAMSIMLFLERLYMALVVAALWLIRRRRRRSNRREQDDDGAENDQLLQDPEAANSPMVLVQIPMFNEKQVYRLSIGAACGMTWPSDKLVIQVLDDSTDPAIREMVEGECGRWAGKGVSIRYENRRNRSGYKAGAMREGLRKAYARECELVAIFDADFQPDADFLLRTVPVLVADPGVALVQARWRFVNADECLLTRIQEMSLDYHFRVEQEVGSACHGFFGFNGTAGVWRVRALEEAGGWKERTTVEDMDLAVRASLRGWRFVYVGHVGVRNELPSTLRAYRYQQHRWSCGPANLFRKIFLEAPPPACPPGRSSTSSTISSSSASSSPTSSPSPSTASSSPPASSPAPTTSASPSTSPSTSPPPSPSSTPPAPRAPAISSSSGSSSRTSCPCTGPRPRSSACSRPPAPTSGSSPTSEATPTPSTSSQLIPPPGLGGRPPPAPAAQASSIMTSMSPRSSWGPACSTAPSTTSPTAATASTSTCSSSRPPPSSSASATSGPSSYYYSYSTCIHV

SEQ ID NO: 130 - protein, 529 aa, Oryza sativa
MASSSSSSLPAAWAAAVRAWAVAPALRAAVWACLAMSAMLVAEAAWMGLASLAAAAARRLRGYGYRWEPMAAPPDVEAPAPAPAEFPMVLVQIPMYNEKEVYKLSIGAACALTWPPDRIIIQVLDDSTDPFVKFSLVQELVELECKEWASKKINIKYEVRNNRKGYKAGALRKGMEHTYAQLCDFVAIFDADFEPESDFLLKTMPYLLHNPKIALVQTRWEFVNYNVCLMTRIQKMSLDYHFKVEQESGSFMHAFFGFNGTAGVWRVSAINQSGGWKDRTTVEDMDLAVRASLKGWEFLYVGDIRVKSELPSTFQAYRHQQHRWTCGAANLFRKMAWEIITNKEVSMWKKYHLLYSFFFVRRAIAPILTFLFYCIVIPLSAMVPEVTIPVWGLVYIPTAITIMNAIRNPGSVHLMPFWILFENVMAMHRMRAALSGLLETARANDWVVTEKVGDQVKDELDVPLLEPLKPTECAERIYIPELLLALYLLICASYDFVLGNHKYYIYIYLQAVAFTVMGFGFVGTRTPCS

SEQ ID NO: 131 - protein, 306 aa, Oryza sativa
MEYPPQFPTPQLHTPISSSSSSSSSPRLYTRRVELLLLLFLAPPQHRRLEAHANAGSEEKDCFFFFFCVCAVFLGFLAMVIGAEIKDEMEEAPPLLLDEAARPRRVALFVEPSPFAYISGYKNRFQNFIKHLREMGDEVIVVTNHEGVPQEFHGAKVIGSWSFPCPMYGKVPLSLALSPRIISEVAKFKPDIIHASSPGIMVFGALAIAKLLGVPLVMSYHTHVPVYIPRYTFSWLVEPMWQVIRFLHRAADLTLVPSVAISKDFETAHVISANRIRLWNKGVDSASFHPKFRSHEMRVRLRTLWA

SEQ ID NO: 132 - protein, 226 aa, Oryza sativa
MEYPPQFPTPQLHTPISSSSSSSSSPRLYTRRVELLLLLFLAPPQHRRLEAHANAGSEEKDCFFFFFCVCAVFLGFLAMVIGAEIKDEMEEAPPLLLDEAARPRRVALFVEPSPFAYISGYKNRFQNFIKHLREMGDEVIVVTNHEGVPQEFHGAKVIGSWSFPCPMYGKVPLSLALSPRIISEVAKFKPDIIHASSPGIMVFGALAIAKLLGVPLVMSYHTHVPV

SEQ ID NO: 133 - protein, 1011 aa, Oryza sativa
MLRHFSALAPSPLLFLLFLPFPWLRLHSSAHSSPPPRSRRDLHGGGGGMAGNDNWINSYLDAILDAGKAAIGGDRPSLLLRERGHFSPARYFVEEVITGYDETDLYKTWLRANAMRSPQERNTRLENMTWRIWNLARKKKEFEKEEACRLLKRQPEAEKLRTDTNADMSEDLFEGEKGEDAGDPSVAYGDSTTGSSPKTSSIDKLYIVLISLHGLVRGENMELGRDSDTGGQVKYVVELAKALSSSPGVYRVDLLTRQILAPNFDRSYGEPTEMLVSTSFKNSKQEKGENSGAYIIRIPFGPKDKYLAKEHLWPFIQEFVDGALGHIVRMSKTIGEEIGCGHPVWPAVIHGHYASAGIAAALLSGSLNIPMAFTGHFLGKDKLEGLLKQGRHSREQINMTYKIMCRIEAEELSLDASEIVIASTRQEIEEQWNLYDGFEVILARKLRARVKRGANCYGRYMPRMVIIPPGVEFGHIIHDFEMDGEEENPCPASEDPPIWSQIMRFFTNPRKPMILAVARPYPEKNITSLVKAFGECRPLRELANLTLIMGNREAISKMNNMSAAVLTSVLTLIDEYDLYGQVAYPKHHKHSEVPDIYRLAARTKGAFVNVAYFEQFGVTLIEAAMNGLPIIATKNGAPVEINQVLNNGLLVDPHDQNAIADALYKLLSDKQLWSRCRENGLKNIHQFSWPEHCKNYLSRILTLGPRSPAIGGKQEQKAPISGRKHIIVISVDSVNKEDLVRIIRNTIEVTRTEKMSGSTGFVLSTSLTISEIRSLLVSAGMLPTVFDAFICNSGSNIYYPLYSGDTPSSSQVTPAIDQNHQAHIEYRWGGEGLRKYLVKWATSVVERKGRIERQIIFEDPEHSSTYCLAFRVVNPNHLPPLKELRKLMRIQSLRCNALYNHSATRLSVVPIHASRSQALRYLCIRWGIELPNVAVLVGESGDSDYEELLGGLHRTVILKGEFNIPANRIHTVRRYPLQDVVALDSSNIIGIEGYSTDDMKSALQQIGVLTQ

SEQ ID NO: 134 - protein, 1011 aa, Oryza sativa; identical to SEQ ID NO: 133

SEQ ID NO: 135 - protein, 878 aa, Oryza sativa
MAPRERDAEPAGEEHAAGEHDVEDLEPREEEEGDMSEDLFEGEKGEDAGDPSVAYGDSTTGSSPKTSSIDKLYIVLISLHGLVRGENMELGRDSDTGGQVKYVVELAKALSSSPGVYRVDLLTRQILAPNFDRSYGEPTEMLVSTSFKNSKQEKGENSGAYIIRIPFGPKDKYLAKEHLWPFIQEFVDGALGHIVRMSKTIGEEIGCGHPVWPAVIHGHYASAGIAAALLSGSLNIPMAFTGHFLGKDKLEGLLKQGRHSREQINMTYKIMCRIEAEELSLDASEIVIASTRQEIEEQWNLYDGFEVILARKLRARVKRGANCYGRYMPRMVIIPPGVEFGHIIHDFEMDGEEENPCPASEDPPIWSQIMRFFTNPRKPMILAVARPYPEKNITSLVKAFGECRPLRELANLTLIMGNREAISKMNNMSAAVLTSVLTLIDEYDLYGQVAYPKHHKHSEVPDIYRLAARTKGAFVNVAYFEQFGVTLIEAAMNGLPIIATKNGAPVEINQVLNNGLLVDPHDQNAIADALYKLLSDKQLWSRCRENGLKNIHQFSWPEHCKNYLSRILTLGPRSPAIGGKQEQKAPISGRKHIIVISVDSVNKEDLVRIIRNTIEVTRTEKMSGSTGFVLSTSLTISEIRSLLVSAGMLPTVFDAFICNSGSNIYYPLYSGDTPSSSQVTPAIDQNHQAHIEYRWGGEGLRKYLVKWATSVVERKGRIERQIIFEDPEHSSTYCLAFRVVNPNHLPPLKELRKLMRIQSLRCNALYNHSATRLSVVPIHASRSQALRYLCIRWGIELPNVAVLVGESGDSDYEELLGGLHRTVILKGEFNIPANRIHTVRRYPLQDVVALDSSNIIGIEGYSTDDMKSALQQIGVLTQ

SEQ ID NO: 136 - protein, 977 aa, Oryza sativa
MYGNDNWINSYLDAILDAGKGAAASASASAVGGGGGAGDRPSLLLRERGHFSPARYFVEEVITGYDETDLYKTWLRANAMRSPQEKNTRLENMTWRIWNLARKKKELEKEEANRLLKRRLETERPRVETTSDMSEDLFEGEKGEDAGDPSVAYGDSTTGNTPRISSVDKLYIVLISLHGLVRGENMELGRDSDTGGQVKYVVELAKALSSCPGVYRVDLFTRQILAPNFDRSYGEPVEPLASTSFKNFKQERGENSGAYIIRIPFGPKDKYLAKEHLWPFIQEFVDGALSHIVKMSRAIGEEISCGHPAWPAVIHGHYASAGVAAALLSGALNVPMVFTGHFLGKDKLEELLKQGRQTREQINMTYKIMCRIEAEELALDASEIVIASTRQEIEEQWNLYDGFEVILARKLRARVKRGANCYGRYMPRMVIIPPGVEFGHMIHDFDMDGEEDGPSPASEDPSIWSEIMRFFTNPRKPMILAVARPYPEKNITTLVKAFGECRPLRELANLTLIMGNREAISKMHNMSAAVLTSVLTLIDEYDLYGQVAYPKRHKHSEVPDIYRLAVRTKGAFVNVPYFEQFGVTLIEAAMHGLPVIATKNGAPVEIHQVLDNGLLVDPHDQHAIADALYKLLSEKQLWSKCRENGLKNIHQFSWPEHCKNYLSRISTLGPRHPAFASNEDRIKAPIKGRKHVTVIAVDSVSKEDLIRIVRNSIEAARKENLSGSTGFVLSTSLTIGEIHSLLMSAGMLPTDFDAFICNSGSDLYYPSCTGDTPSNSRVTFALDRSYQSHIEYHWGGEGLRKYLVKWASSVVERRGRIEKQVIFEDPEHSSTYCLAFKVVNPNHLPPLKELQKLMRIQSLRCHALYNHGATRLSVIPIHASRSKALRYLSVRWGIELQNVVVLVGETGDSDYEELFGGLHKTVILKGEFNTSANRIHSVRRYPLQDVVALDSPNIIGIEGYGTDDMRSALKQLDIRAQ

SEQ ID NO: 137 - protein, 203 aa, Oryza sativa
MGPTCQSLFLSFSVHLLPPAPPGCGAATRRGSCTEAEAENDPFDVIHSESVAMFHCWARDVPNLVVSWHGISLEALHSRIYQDLTRGEDERMSPASNHSLAQSVYRVLSEVHFFRSYVHHVAISDTTGEMLRDVYQIPNRRVHVILNGVDEAQFEPDAALGRAFREDLRLPKGANLVLGVSGRLVKGADLVLVAVGQISLSLP

SEQ ID NO: 138 - protein, 609 aa, Oryza sativa
MSALTTSQLATSATGFGIADRSAPSSLLRHGFQGLKPRSPAGGDATSLSVTTSARATPKQQRSVQRGSRRFPSVVVYATGAGMNVVFVGAEMAPWSKTGGLGDVLGGLPPAMAANGHRVMVISPRYDQYKDAWDTSVVAEIKVADRYERVRFFHCYKRGVDRVFIDHPSFLEKVWGKTGEKIYGPDTGVDYKDNQMRFSLLCQAALEAPRILNLNNNPYFKGTYGEDVVFVCNDWHTGPLASYLKNNYQPNGIYRNAKVAFCIHNISYQGRFAFEDYPELNLSERFRSSFDFIDGYDTPVEGRKINWMKAGILEADRVLTVSPYYAEELISGIARGCELDNIMRLTGITGIVNGMDVSEWDPSKDKYITAKYDATTAIEAKALNKEALQAEAGLPVDRKIPLIAFIGRLEEQKGPDVMAAAIPELMQEDVQIVLLGTGKKKFEKLLKSMEEKYPGKVRAVVKFNAPLAHLIMAGADVLAVPSRFEPCGLIQLQGMRYGTPCACASTGGLVDTVIEGKTGFHMGRLSVDCKVVEPSDVKKVAATLKRAIKVVGTPAYEEMVRNCMNQDLSWKGPAKNWENVLLGLGVAGSAPGIEGDEIAPLAKENVAAP

SEQ ID NO: 139 - protein, 609 aa, Oryza sativa; identical to SEQ ID NO: 138

SEQ ID NO: 140 - protein, 609 aa, Oryza sativa; identical to SEQ ID NO: 138

SEQ ID NO: 141 - protein, 609 aa, Oryza sativa; identical to SEQ ID NO: 138

SEQ ID NO: 142 - protein, 536 aa, Oryza sativa
MKVYITSAAPLAGEATKAMASPPSPPPHQHQQAATRRGCRSAVVTGLLAGVLLFRAALLTIEAGASLCPSTTGCLDWRAGLGDWLYGGSGDAMEEFMKEWRRGRREASLLDPVVVEAAPDSLDGLMAEMDTMLASYDRLDMEAVVLKIMAMLLKMDRKVKSSRIRALFNRHLASLGIPKSMHCLTLRLAEEFAVNSAARSPVPLPEHAPRLADASYLHVTIVTDNVLAAAVAVASAVRSSAEPARLVFHVVTDKKSYVPMHSWFALHPVSPAVVEVKGLHQFDWRDGGAIASVMRTIEEVQRSSMEYHQCDASVVREYRRLEASKPSTFSLLNYLKIHLPEFFPELGRVILLDDDVVVRKDLTGLWEQHLGENIIGAVGGHNPGEDGVVCIEKTLGDHLNFTDPEVSNVLESARCAWSWGVNVVNLDAWRRTNVTDTYQLWLEKNRESGFRLWKMGSLPPALIAFDGRVQAVEPRWHLRGLGWHTPDGEQLQRSAVLHFSGPRKPWLEVAFPELRELWLGHLNRSDSFLQGCGVVE

SEQ ID NO: 143 - protein, 654 aa, Oryza sativa
MVKTNRFINSLSKRGYIGSYHYEKDAKYRPFSALLPEGSNPKMLYVKLVLIILMCGSFVSLLNSPSIHHNDDHHTESSAGVPRVSYEPDDTRYVSDVTVDWPKISKAMQLVAGAEHGGGARVALLNFDDGEVQQWRTALPQTAAAVARLERAGSNVTWEHLYPEWIDEEELYHAPTCPDLPEPAVDADGDGEEVAVFDVVAVKLPCRRGGGWSKDVARLHLQLAAARLAATRGRGGAAAHVLVVSASRCFPIPNLFRCRDEVAPRDGDVWLYRPDADALRRDLALPVGSCRLAMPFSALAAPHVAAASAPPPRREAYATILHSEELYACGALVAAQSIRMASASGAPSEPERDMVALVDETISARHRGALEAAGWKVRAIRRVRNPRAAADAYNEWNYSKFWLWSLTEYDRVVFLDADLLVQRPMSPLFAMPEVSATANHGTLFNSGVMVVEPCGCTLRLLMDHIADIDSYNGGDQGYLNEVFSWWHRLPSHANFMKHFWEGDSGERLAAARRAVLAAEPAVALAVHFVGMKPWFCFRDYDCNWNSPQLRQFASDEAHARWWRAHDAMPAALQGFCLLDERQKALLRWDAAEARAANFSDGHWRVPIADPRRNICATAAGDGEAAAACVEREIENRRVEGNRVTTSYAKLIDNF

SEQ ID NO: 144 - protein, 493 aa, Oryza sativa
MAGGGGGGRASAQRRAALAALITLLLLASLAFLLSATGTASAPNSAPFRLAAIRRHAEDHAAVLAAYAAQARKLSAASASQTESFLSISGHLSSLSSRISLSTVALLEKETRGQIKRARSLAGAAKEAFDTQSKIQKLSDTVFAVDQQLLRARRAGLLNSRIAAGSTPKSLHCLVMRLLEARLANASAIPDDPPVPPPQFTDPALYHYAIFSDNVLAVSVVVASAARAAAEPARHVFHVVTAPMYLPAFRVWFARRPPPLGTHVQLLAVSDFPFLNASASPVIRQIEDGNRDVPLLDYLRFYLPEMFPALRRVVLLEDDVVVQRDLAGLWRVDLGGKVNAALETCFGGFRRYGKHINFSDPAVQERFNPRACAWSYGLNVFDLQAWRRDQCTQRFHQLMEMNENGTLWDPASVLPAGLMTFYGNTRPLDKSWHVMGLGYNPHIRPEDIKGAAVIHFNGNMKPWLDVAFNQYKHLWTKYVDTEMEFLTLCNFGL

SEQ ID NO: 145 - protein, 588 aa, Oryza sativa
MAGARAMAFVALCALAAFPVAVTGAQVDPLYSSKQVLDWSSQANIKLQNFSLTEEDGLQLLVRPEEVTHRKLRERTRIKKKIEPVQQDDEALVKLENAGIERSKAVDSAVLGKYSIWRRENENEKADSKVRLMRDQMIMARIYSVLAKSRDKLDLHQDLLSRLKESQRSLGEATADAELPKSASERVKVMGQLLAKARDQLYDCKAITQRLRAMLQSADEQVRSLKKQSTFLSQLAAKTIPNGIHCLSMRLTIDYYLLSPEKRKFPKSENLENPDLYHYALFSDNVLAASVVVNSTIMNAKEPEKHVFHLVTDKLNFGAMNMWFLLNPPGDATIHVENVDDFKWLNSSYCPVLKQLESVAMKEYYFKADRPKTLSAGSSNLKYRNPKYLSMLNHLRFYLPQVYPKLNKILFLDDDIVVQKDLTGLWEVDLNGNVNGAVETCGESFHRFDKYLNFSNPNIAQNFDPNACGWAYGMNMFDLEEWKKKDITGIYHKWQNMNENRLLWKLGTLPPGLLTFYKLTHPLDKSWHVLGLGYNPSIERSEIDNAAVIHYNGNMKPWLEIAMSKYRPYWTKYINYEHTYVRGCKISQ

SEQ ID NO: 146 - protein, 726 aa, Oryza sativa
MATMASAAAASASARRWRWRWKWRTRDAVLALLIASVLAPPLLLYGGAPIAPFSGPILMGSAASGLDLSNLIARKEVRERLNALKQDAFAAVKEPIQTVASDAAALKAGLIQHIVDQSSGIDRGTKDNGMVASVNKKGGVEFTKENGLIDDGKLRENKVRAMRNSSGLNITLNKVKGSYAVSTEEYAFHQTIPPLTDLMFGTFPPALLDHTADRPPEKTTDTTSEDSDIRAISNNTSHSTASPDSTIRVLRDQLKRARTYIGFLSSRGNHGFIKDLRRRMRDIQQALSGATNDKQLPKKYYLSHRYTKFFTVGISDDDLCLVSGVHGRIREMELTLTKIKQVHENCAAIISKLQATLHSTEEQMQAHKQEANYVTQIAAKALPKRLNCLAMRLTNEYYSSSSSNKHFPYEEKLEDPKLQHYALFSDNVLGAAVVVNSTIIHAKTPENHVFHIVTDKLNYAAMRMWFLENSQGKAAIEVQNIEDFTWLNSSYSPVLKQLESQFMINYYFKTQQDKRDNNPKFQNPKYLSILNHLRFYLPEIFPKLNKVLFLDDDIVVQQDLSALWSIDLKGKVNGAIQTCGETFHRFDRYLNFSNPLIAKNFERRACGWAYGMNMFDLSEWRKRNITDVYHYWQEQNEHRLLWKLGTLPAGLVTFWNQTFPLDHKWHLLGLGYKPNVNQKDIEGAAVIHYNGNRKPWLEIAMAKYRKYWSKYVNFDNVFIRQCNIHP

SEQ ID NO: 147 - protein, 707 aa, Oryza sativa
MVAVARGRRCRGVVLLLLLSSVLAPLVLYGGSPVSVSTLPDSTVASGVLDRDGEYNLVVAASDVSLTKDLTIERLGEHKNRVLSATEDWQVVEAASKNPAFEKSDASVSRKDPGSGDANVVITEGNGAAQSGRDGVIWEVVSRDRGSDGFTQPWEINGGEERDGERVDRVKLGVSVEEQNDGTGETGVNNIAGTHTSGNLNSSLEKERSTGRLSEQVTKAIPKESYTPTTNSNSALPTSVSAGHSTTSPDATIRTIKDQLTRATTYLSLVASRGNHGFARELRARMRDIQRVLGDATSGGQLPQNVLSKIRAMEQTLGKGKRILDSCSGALNRLRATLHSTEERLQSHKKETNYLAQVAAKSLPKGLHCLPLRLTNEYYYTNSNNKKFPHIEKLEDPKLYHYALFSDNVLAAAVVVNSTIIHAKKPADHVFHIVTDRLNYAAMKMWFLANPLGEAAIQVQNIEEFTWLNSTYSPVMKQLESQSMIDYYFKSGQARRDENPKFRNPKYLSMLNHLRFYLPEIFPKLSKVLFLDDDTVVQQDLSAIWSIDLKGKVNGAVETCGETFHRFDKYLNFSNPLIASNFDPRACGWAYGMNVFDLSEWRRQKITDVYHNWQRLNENRILWKLGTLPAGLVTFWNRTFPLHHSWHQLGLGYNPNINEKDIRRASVIHYNGNLKPWLEIGLSRYRKYWSKYVDFDQVFLRDCNINP

SEQ ID NO: 148 - protein, 456 aa, Oryza sativa
MSSPPSSGSERSLASLVSAAAHSVKLNRAYLLAPAVAAGLLAAVLLSSLLDFSAFSASPRPAFPPPTAGAPANASALSAPPRAPVRTALDTLGTRPREPFTALRDAYARWDAAVGCAAFAEKHRSRSSPPPGPAALQDPEAAPCGSLRLPHVALAVRGVTWVPDILDGVYQCRCGLTCLWSRNEEALADTPDVVLYEIWPPPDTRKQGEPLRAFMDIEPTRKRSGHEDIFIGYHADDDVQVTYAGKFFRITHNYHVATHKRDDVLVYWSSSRCFEHRNKIARELFRHLPAHSFGRCENNVGGGDKALELYPDCARDGHGAAEWWDHLHCAMSHYKFVLAIENTIADSYSTEKLYYALEAGSVPIYFGAPNARDLAPPGSYIDGAAFASAEELAAYVREVAGDPAAYAEFHAWRRCGVLGGYGRNRLVSLDTLPCRLCERASRMGGRHAPAPNATVS

SEQ ID NO: 149 - protein, 419 aa, Oryza sativa
MHLSGARLRIPTWCTMPHGSWLLQTCSPSAALASLAVVTTSLLIIGYASSSFFLGAPAYEYDDVVEAAAAVPRRGPGYPPVLAYYISGGHGDSVRMTRLLKAVYHPRNRYLLHLDAGAGAYERARLAGYARSERAFLEYGNVHVVGKGDPVDGRGPSAVAAVLRGAAVLLRVGAEWDWLVTLGASDYPLVTPDDLLYAFSSVRRGLSFIDHRMDSGGAEAVVVDQNLLQSTNAEISFSSGQRAKPDAFELFRGSPRPILSRDFVEYCVVAPDNLPRTLLLYFSNSLSPMEFYFQTVMANSAQFRNSTVNHNLRHTVAQDGGAPTSQGADGQQASRYDAMVGSGAAFAGAFGDDDDALLQRIDEEVLRRPLDGVTPGEWCVADGEEGTDNECSVGGDIDVVRHGAKGRKLATLVVDLVGA

SEQ ID NO: 150 - protein, 273 aa, Oryza sativa
MLMYYTNMPLPHRKYFQTVLCNSPEFNRTVVNHDLHYSKWDSSSKKEPLLLTLDDVENMTQSGVAFGTRFSMDDPVLNHIDEEILHRQPEEPAPGGWCIGVGDASPCSVSVDLQACLINSRAASTSAQTLTPRRLRPTLPEKTLKHSSSDVVPATRRSWSSIPSSTNSATYRLSDRIMATASSMVYRRIRGTTMDGRLYSLRTCTIVFASAASVTLAAARLARSSSGSMNRSICAARPRKMLSTLPFSAMIVLSTLVAPAATPLSGSRHSSPA

SEQ ID NO: 151 - protein, 449 aa, Oryza sativa
MDTHAVPRAAATVDLRWLLSVAAGAVFALLLLLAASPPFPLRPASLFTTTSPRRALPPLFVESSSTLSAPPPTPPPSPPRFAYLISGSAGDAPMMRRCLLALYHPRNSYILHLDAEAPDDDRAGLAAFVAAHPALSAAANVRVIRKANLVTYRGPTMVTTTLHAAAAFLWGRGGGRGADWDWFINLSASDYPLVTQDDLMHVFSKLPRDLNFIDHTSDIGWKAFARAMPMIVDPALYMKTKGELFWIPERRSLPTAFKLFTGSAWMVLSRPFVEYLIWGWDNLPRTVLMYYANFISSPEGYFHTVACNAGEFRNTTVNSDLHFISWDNPPMQHPHYLADADWGPMLASGAPFARKFRRDDSVLDRIDADLLSRRPGMVAPGAWCGAAAAADGDSNSTTTGGAVDPCGVAGGGGEAVRPGPGAERLQRLVASLLSEENFRPRQCKVVEAN

SEQ ID NO: 152 - protein, 424 aa, Oryza sativa
MRPPARSPPRLAAAAAALATSAALLLICGTWPASASGFGAYTASSSARRASSTGGADAPPPSFAYLISGTGGEAARVVRLLRAVYHPRNRYLLHLDAAAGAEERAELAAAVRGVRAWRERANVDVVGEGYAVDRAGPSALAAALHGAAVLLRVAADWDWFVTLSSSDYPLVTQDDLLYAFSSVPRDLNFIDHTSDLGWKEHERFEKLIVDPSLYMDRNSEILPATEPRQMPDAFKIFTVNYKFLLRTQSVLKHERRTNNDDGSPWVILSRNFTEHCVHGWDNLPRKLLMYFANTAYSMESYFQTVICNSSKFRNTTVNGDLRYFVWDDPPGLEPLVLDESHFDDMVNSSAAFARRFVDDSPVLKKIDKEILNRSSAVCASFSRRRGMDVDSCSKWGDVNVLQPARAGEQLRRFISEISQTRGCS

SEQ ID NO: 153 - protein, 167 aa, Oryza sativa
MMLTHQFIEYCIWGWDNLPRTVLMYYANFLSSPEGYFHTVICNVPEFRNTTVNHDLHFISWDNPPKQHPHYLTLNDFDGMVNSNAPFARKFGREDPVLDKIDQELLGRQPDGFVAGGWMDLLNTTTVKGSFTVERVQDLRPGPGADRLKKLVTGLLTQEGFDDKHCL

SEQ ID NO: 154 - protein, 886 aa, Oryza sativa
MPHHRHLTPSPSHEEHETPNPSLTPPPMQLAALASDEPPPPPPEQSPRRIVVAHRLPLNATPDPGSPFGFAFSLSADAHALQLSHGLGLAHVVFVGTLPAEAARALRRSDELDRHLLGCFSCLPVFLPPRAHDEFYAGFCKHYLWPRLHYLLPHAPAANGYLHFDAGLYRSYASANRSFAARVVEVLSPDDGDLVFVHDYHLWLLPSFLRRGCPRCRVGFFLHSPFPSAEVFRSIPVREDLLRALLNADLVGFHTYDYARHFLSACSRLLGLAYTSRHGRVGINYHGRTVLIKFLSVGVDMGLLRTAMASPEAAAKFREITEVEYKGRVLMVGVDDVDIFKGVRLKLLAMESLLETYPALRGRVVLVQIHNPTRCGGRDVERVRGETAKIQARINARFGGPGYQPVVVVDRAVPMAEKVAYYAAAECCVVSAVRDGLNRIPYFYTVCREEGPVDAKGAAGGQPRHSAIVLSEFVGCSPSLSGAIRVNPWNIEAMAEAMHGALTMNVAEKQARHVKHYTYLKLHDVIVWARSFAADLQLACKDRSTMRTIGMGIGPSYRVVAVDAAFKKLPPELVNLSYRAAAAAAAGGGGGRLILLDYDGTLEPTGAFDNAPSDAVIVILDELCSDPNNVVFIVSGRSKDDLERWLAPCANLGIAAEHGYFIRWSRDAPWETMASKQLAAAMEWKAAAKNVMRHYAEATDGSYIEAKETGMVWRYEDADPRLAPLQAKELLDHLATVLASEPVAVRSGYKIVEVIPQGVSKGVAAECIVSAMAARRGGALGFVLCVGDDRSDEDMFGALASLCGGGKNGGASSSTTTTTALLAAAQVFACTVGNKPSMASYYLNDKEEVVDMLHGLAFSSPSSRLRAAAAPRRPADFDIKSLLRCE

SEQ ID NO: 155 - protein, 882 aa, Oryza sativa
MPHHRHLTPSPSHEEHETPNPSLTPPPMQLAALASDEPPPPPPEQSPRRIVVAHRLPLNATPDPGSPFGFAFSLSADAHALQLSHGLGLAHVVFVGTLPAEAARALRRSDELDRHLLGCFSCLPVFLPPRAHDEFYAGFCKHYLWPRLHYLLPHAPAANGYLHFDAGLYRSYASANRSFAARVVEVLSPDDGDLVFVHDYHLWLLPSFLRRGCPRCRVGFFLHSPFPSAEVFRSIPVREDLLRALLNADLVGFHTYDYARHFLSACSRLLGLAYTSRHGRVGINYHGRTVLIKFLSVGVDMGLLRTAMASPEAAAKFREITEVEYKGRVLMVGVDDVDIFKGVRLKLLAMESLLETYPALRGRVVLVQIHNPTRCGGRDVERVRGETAKIQARINARFGGPGYQPVVVVDRAVPMAEKVAYYAAAECCVVSAVRDGLNRIPYFYTVCREEGPVDAKGAAGGQPRHSAIVLSEFVGCSPSLSGAIRVNPWNIEAMAEAMHGALTMNVAEKQARHVKHYTYLKLHDVIVWARSFAADLQLACKDRSTMRTIGMGIGPSYRVVAVDAAFKKLPPELVNLSYRAAAAAAAGGGGGRLILLDYDGTLEPTGAFDNAPSDAVIVILDELCSDPNNVVFIVSGRSKDDLERWLAPCANLGIAAEHGYFIRWSRDAPWETMASKQLAAAMEWKAAAKNVMRHYAEATDGSYIEAKETGMVWRYEDADPRLAPLQAKELLDHLATVLASEPVAVRSGYKIVEGVSKGVAAECIVSAMAARRGGALGFVLCVGDDRSDEDMFGALASLCGGGKNGGASSSTTTTTALLAAAQVFACTVGNKPSMASYYLNDKEEVVDMLHGLAFSSPSSRLRAAAAPRRPADFDIKSLLRCE

SEQ ID NO: 156 - protein, 284 aa, Oryza sativa
MILSVLKQTQRPVKFWFIKNYLSPQFKDVIPHMAQEYGFEYELVTYKWPTWLHKQKEKQRIIWAYKILFLDVIFPLSLRKVIFVDADQIVRADMGELYDMNLKGRPLAYTPFCDNNKEMDGYRFWKQGFWKDHLRGRPYHISALYVVDLAKFRQTASGDTLRVFYETLSKDPNSLSNLDQDLPNYAQHTVPIFSLPQEWLWCESWCGNATKARAKTIDLCNNPMTKEPKLQGAKRIVPEWVDLDSEARQFTARILGDNPESPGTTSPPSDTPKSDDKGAKHDEL

SEQ ID NO: 157 - protein, 284 aa, Oryza sativa; identical to SEQ ID NO: 156

SEQ ID NO: 158 - protein, 580 aa, Oryza sativa
MRGASGGGEGFVGASSVSNNISLPNEGTSPRGTDNAECSETSSDRSNSESIKPEECAMPSSIFDKKISIKKKLRLLSRMAILKDDGTVEVDIPTNAEAASLDLSSNDYCNEAFSGEPLASSDFQHRPPMQIVMLIVGTRGDVQPFIAIGKRLQIYGHRVRLATHANFKDFVVTAGLEFYPLGGDPKLLAGYMVKNKGFLPATPSEIPIQRKEIKEIIFSLLPACKDPDTDTGAPFNVNAIIANPAAYGHVHVAEALKVPIHIIFTMPWTPTCEFPHPFSRVKQPAGYRLSYQIVDSFVWLGIRDIINDLRKRKLKLRPVTYLSSAHAYSNDIPHAYIWSPYLVPKPKDWGPKIDVVGFCFLDLASNYKPPEPLLKWLESGEKPIYIGFGSLPIPEPDKLTRIIVEALEITGQRGIINKGWGGLGNLEEPKEFVYVIDNIPHDWLFLQCKAVVHHGGAGTTAASLKAACPTTIVPFFGDQFFWGNMVHARGLGAPPVPVEQLQLHLLVDAIKFMMDPKVKERAVELAKAIESEDGVDGAVKAFLKHLPQPRSLEKPQPAPPSSTFMQPFLLPVKRCFGIAT

SEQ ID NO: 159 - protein, 394 aa, Oryza sativa
MSDTGGGHRASAEALRDAFRLEFGDAYQVFVRDLGKEYGGWPLNDMERSYKFMIRHVRLWKVAFHGTSPRWVHGMYLAALAYFYANEVVAGIMRYNPDIIISVHPLMQHIPLWVLKWQSLHPKVPFVTVITDLNTCHPTWFHHGVTRCYCPSAEVAKRALLRGLEPSQIRVYGLPIRPSFCRAVLDKDELRKELDMDPDLPAVLLMGGGEGMGPVEETARALSDELYDRRRRRPVGQIVVICGRNQVLRSTLQSSRWNVPVKIRGFEKQMEKWMGACDCIITKAGPGTIAEALIRGLPIILNDFIPGQEVGNVPYVVDNGAGVFSKDPREAARQVARWFTTHTNELRRYSLNALKLAQPEAVFDIVKDIHKLQQQPATVTRIPYSLTSSFSYSI

SEQ ID NO: 160 - protein, 320 aa, Oryza sativa
MSDTGGGHRASAEALRDAFRLEFGDAYQVFVRDLGKEYGGWPLNDMERSYKFMIRHVRLWKVAFHGTSPRWVHGMYLAALAYFYANEVVAGIMRYNPDIIISVHPLMQHIPLWVLKWQSLHPKVPFVTVITDLNTCHPTWFHHGVTRCYCPSAEVAKRALLRGLEPSQIRVYGLPIRPSFCRAVLDKDELRKELDMDPDLPAVLLMGGGEGMGPVEETARALSDELYDRRRRRPVGQIVVICGRNQVLRSTLQSSRWNVPVKIRGFEKQMEKWMGACDCIITKAGPGTIAEALIRGLPIILNDFIPGQVCADATILNSLE

SEQ ID NO: 161 - protein, 384 aa, Oryza sativa
MKRRHWSHPSCGLLLLVAVFCLLLVFRCSQLRHSGDGAAAAAPDGGAGRNDGDDVDERLVELAAVDPAAMAVLQAAKRLLEGNLARAPERHRDVALRGLREWVGKQERFDPGVMSELVELIKRPIDRYNGDGGGGGEGEGRRYASCAVVGNSGILLAAEHGELIDGHELVVRLNNAPAGDGRYARHVGARTGLAFLNSNVLSQCAVPRRGACFCRAYGEGVPILTYMCNAAHFVEHAVCNNASSSSSGAADATAAAPVIVTDPRLDALCARIVKYYSLRRFARETGRPAEEWARRHEEGMFHYSSGMQAVVAAAGVCDRVSVFGFGKDASARHHYHTLQRRELDLHDYEAEYEFYRDLESRPEAIPFLRQRNSGFRLPPVSFYR

SEQ ID NO: 162 - protein, 400 aa, Oryza sativa
MSWRKGGGGDGGVSRRWAVLLCLGSFCLGLLFTNRMWTLPEANEIARPNGNGDEGNTLVAAECGPKKVQHPDYKDILRVQDTHHGVQTLDKTIASLETELSAARSLQESLLNGSPVAEEFKLSESIGRRKYLMVIGINTAFSSRKRRDSIRYTWMPQGEKRKKLEEEKGIIIRFVIGHSAISGGIVDRAIEAEDRKHGDFMRIDHVEGYLALSGKTKTYFATAVSLWDADFYVKVDDDVHVNIATLGQILSNHALKPRVYIGCMKSGPVLTEKGVRYYEPEHWKFGEPGNKYFRHATGQLYAISKDLATYISINRHVLHKYINEDVSLGSWFIGLDVEHIDDRRLCCGTPPDCEWKAQAGNTCAASFDWRCSGICNSEGRIWEVHNKCAEGEKALWNATF

SEQ ID NO: 163 - protein, 400 aa, Oryza sativa; identical to SEQ ID NO: 162

SEQ ID NO: 164 - protein, 650 aa, Oryza sativa
MAHAADTAIMLVFVFRLLAFTLTILLSPLMWVTKRLGITVLIVLFPLLIVHHLIVNSPVSGPSRYQVIHSNLLGWLSDSLGNSVAQNPDNTPVEVIPADASASNSSDSGNSSLEGFQWLNTWNHMKQLTNISDGLPHANEAIDNARTAWENLTISVHNSTSKQIKKERQCPYSIHRMNASKPDTGDFTIDIPCGLIVGSSVTIIGTPGSLSGNFRIDLVGTELPGGSGKPIVLHYDVRLTSDELTGGPVIVQNAFTASNGWGYEDRCPCSNCNNATQVDDLERCNSMVGREEKRAINSKQHLNAKKDEHPSTYFPFKQGHLAISTLRIGLEGIHMTVDGKHVTSFPYKAGLEAWFVTEVGVSGDFKLVSAIASGLPTSEDLENSFDLAMLKSSPIPEGKDVDLLIGIFSTANNFKRRMAIRRTWMQYDAVREGAVVVRFFVGLHTNLIVNKELWNEARTYGDIQVLPFVDYYSLITWKTLAICIYGTGAVSAKYLMKTDDDAFVRVDEIHSSVKQLNVSHGLLYGRINSDSGPHRNPESKWYISPEEWPEEKYPPWAHGPGYVVSQDIAKEINSWYETSHLKMFKLEDVAMGIWIAEMKKGGLPVQYKTDERINSDGCNDGCIVAHYQEPRHMLCMWEKLLRTNQATCCN

SEQ ID NO: 165 - protein, 307 aa, Oryza sativa
MAMKRLSFSLFLLPFLLLAFVYSLFFPGYFSILPSLAARCSNSVAATPANATGPAVDLRVLLGVVTRAEMYERRALLRLAYALQPAPARAVVDVRFFVCSLAREEDAVLVSLEIIAHGDVVVLNCTENMDDGKTHSYFSSLPALFADAPYDYVGKIDDDSYYRLASLADTLRDKPRRDLYHGFPAPCHADPRSQFMSGMGYIVSWDVAAWVAATEALRGDVKGPEDEVFGRWLRRGGKGSNRYGEETRMYDYLDGGMREGVNCFRHALVADTVVVHKLKDRLKWARTLKFFNATQGLKPSKLYHVDL

SEQ ID NO: 166 - protein, 307 aa, Oryza sativa
MAMKKSFSLLFFLPFLLLAIIYFVIFPNEFRLQSSLAACGDSAPATAADAVAKAAPDIRVLLGVLTRADKYERRALVRLAYALQPAPARAVVHVRFVVCNLTAEEDAALVGLEIAAYGDIIVLDCTENMDNGKTYTYFSAVPRLFAGEPYDYVGKTDDDTYYRLGALADALRDKPRRDAYYGFLTPCHADPRTQYMSGMGYVVSWDVAAWVAATPELQNDLKGPEDKLFGRWLRWGGRGRNVFGAEPRMYDYLDGGMRHGPTCFRHLLQADTVAVHKLKDNLKWARTLNFFNATEGHKASPLFHVDH

SEQ ID NO: 167 - protein, 313 aa, Oryza sativa
MAANFSACLVPVAVLALFYLVIFPNDLSQLKSALAPCDAASKSVAAAAAADDDVDFRMFFGILTRPDFYERRALLRMAYALQPPPRRAAIDVRFVMCSLDKEEDAVLVAMEIITHGDILVLNCTENMNDGKTYDYFSALPRLFPAGAEPRYDFAGKIDDDTYYRLGALADTLRRKPRRDMYHGFLNPCHIDPAWQYMSGMGYIVSWDVAEWIAASPELRGREIGYEDDVFGRWLRGAGKGKNRFGEEPRMYDYLDREMYGADVNCFRHELIADTVAVHKLKDRLKWARTLRFFNATDGLKPSKMYHVDLTPRI

SEQ ID NO: 168 - protein, 618 aa, Oryza sativa
MRRPRRAAAGCGCGRRLRPLLMLLPFAALLSVATFSLHSPVGLVVPAAVTVATSTDTDTDTASSHHHHHGLVGDAVSGIDIRALNATPPLHAAAVRAFRSGGRLLREAFLPGAAPPPAVGGGPDPSPPRCPPFVALSGAELRGAGDALALPCGLGLGSHVTVVGSPRRVAANAVAQFAVEVRGGGDGDGDEAARILHFNPRLRGDWSGRPVIEQNTRFRGQWGPALRCEGWRSRPDEETVDGLVKCEQWGGNYGSKLNELKKMWFLNRVAGQRNRGSMDWPYPFVEDELFVLTLSTGLEGYHVQVDGRHVASFPYRVGYSLEDAAILSVNGDVDIQSIVAGSLPMAYPRNAQRNLELLTELKAPPLPEEPIELFIGILSAGSHFTERMAVRRSWMSSVRNSSGAMARFFVALNGRKKVNEDLKKEANFFGDIVIVPFADSYDLVVLKTVAICEYATRVISAKYIMKCDDDTFVRLDSVMADVRKIPYGKSFYLGNINYYHRPLREGKWAVSFEEWPREAYPPYANGPGYIVSSDIANFVVSEMEKGRLNLFKMEDVSMGMWVGQFVDTVKAVDYIHSLRFCQFGCVDDYLTAHYQSPGQMACLWDKLAQGRPQCCNPR

SEQ ID NO: 169 - protein, 651 aa, Oryza sativa
MPPPKRACRLALLAAGGAYLLFLLLFELPSVSISVSTASPAAAAAATTHRPRRRELEAASSSSSSSSSPLRPLKTAFPSRRSPLAVSSIRFRRRNSSSIDASAASAFAAARPLMHHLLSSFSSPSPSSSPSPSPSTSDSCPSTISVPTHRLTSGGGGGNGGGVTVELPCGMGVGSHVTVVARPRPARPESEPRIAERRGGEAAVMVSQFMVELLGTKAVQGEEPPRILHFNPRIRGDFSGRPVIELNTCYRMQWAQPQRCEGWASQPHEETVDGQLKCERWIRDDNSKSEESNAQLWLNRLIGRGNEVAADRPYPFEEGKLFALTVTAGLDGYHVNVDGRHVASFPYRTGYSLEDATGLSLKGDLDIESILAGHLPNSHPSFAPQRYLEMSEQWKAPPLPTEPVELFIGILSAANHFAERMAVRKSWMIDTRKSSNVVARFFVALNGEKEINEELKKEAEFFSDIVIVPFMDSYDLVVLKTIAIAEYGVRIVPAKYIMKCDDDTFVRIDSVLDQVKKVEREGSMYIGNINYYHRPLRSGKWSVSYEEWQEEVYPPYANGPGYVISSDIAQYIVSEFDNQTLRLFKMEDVSMGMWVEKFNSTRQPVKYSHDVKFFQSGCFDGYYTAHYQSPQQMICLWRKLQFGSAQCCNMR

SEQ ID NO: 170 - protein, 390 aa, Oryza sativa
MPLHHHRHHHHSAAVAVAVADDDDEAKPRRPYSTFASPRAPTSAFSAAFSTHRLLVLFSVACLLVAAASLAFAFSARAATLQPPPLAAVAEATAKVAFRCGRAEDTLRAFLASSSGNYSSAAEGREREKVLAVVGVHTEIGSAARRAALRATWFPPKPEGIVSLEHGTGLSFRFVVGRTKDKEKMADLQKEVDMYHDFLFVDAEEDTKPPQKMLAFFKAAYDMFDADFYVKADDAIYLRPDRLAALLAKDRLHQRTYIGCMKKGPVVNDPNMKWYESSWELLGNEYFSHASGLLYALSSEVVGSLAATNNDSLRMFDYEDVTIGSWMLAMNVKHEDNRAMCDSACTPTSIAVWDSKKCSNSCNTTEIVKALHNTTLCSKSPTLPPEVEDE

SEQ ID NO: 171 - protein, 390 aa, Oryza sativa; identical to SEQ ID NO: 170

SEQ ID NO: 172 - protein, 357 aa, Oryza sativa
MSSSSSLYKQLGLGAGSPVSASHLLLLVLGAGFLALTVFVVHPNEFRIQSFFSGGCGRPGTDAATAAVAASPVKNVSGGASDAAAATTAARSPDNDVRVLIGIQTLPSKYERRNLLRTIYSLQAREQPSLAGSVDVRFVFCNVTSPVDAVLVSLEAIRHGDIIVLDCAENMDNGKTYTFFSTVARAFNSSDGEGSGSGSPPPPRYDYVMKADDDTYLRLAALVESLRGAARRDAYYGLQMPCDRENFYPFPPFMSGMGYALSWDLVQWVATAEESRRDHVGPEDMWTGRWLNLASKAKNRYDMSPRMYNYRGASPPSCFRRDFAPDTIAVHMLKDAARWAETLRYFNATAALRPSHL

SEQ ID NO: 173 - protein, 330 aa, Oryza sativa
MSYLQKPSYYTISLVVVLLLPFTILFASFLLPFSAYLRGPPPIAAGSVVAGGCRHGAADGGGGGGGGGGVRPEISILVGVHTMAKKHSRRHLVRMAYAVQQTAALRGAARVDVRFALCARPMPQEHRAFVALEARAYGDVMLIDCDESPDKGKTYDYFAGLPAMLSSGGGGGGGGEGRPYDYVMKVDDDTYLRLDELAETLRRAPREDMYYGAGLPFLDKESPPFMLGMGYVLSWDLVEWIAGSDMAKALAIGAEDVTTGTWLNMGNKAKNRVNIFPRMYDFKGVKPEDFLEDTIGVHQLKQDLRWAQTLEHFNVTCLDPSSKMTNSLLS

SEQ ID NO: 174 - protein, 395 aa, Oryza sativa
MSWRRGDGGVARRWVLLLCTGSFFLGLLFTDRMWTLPEVTEVARPNGRREKEDELTAGDCNSAKVNVKRDYREILQTQDTHHAVWTLDKTIAKLETELSAARTLQESFLNGSPVSEGHKGSDSTGRQKYLMVIGINTAFSSRQRRDSIRNTWMPQGIKRRKLEEEKGIVIRFVIGHSAISGGIVERAIKAEERKHGDFMRIDHVEGYLELSGKTKTYFATAVSLWDADFYVKVDDDVHVNIATLGQILSNHVKKPRVYIGCMKSGPVLSDKDVRYYEPEHWKFGDQYFRHATGQLYAISKDLATYISINKRVLHKYINEDVSLGAWFIGLDVEHIDERRLCCGTPPDCEWKAQAGNTCAVSFDWKCSGICDSVENMQWVHNRCGESEKSLWISSF

SEQ ID NO: 175 - protein, 310 aa, Oryza sativa
MSWRRGDGGVARRWVLLLCTGSFFLGLLFTDRMWTLPEVTEVARPNGRREKEDELTAGDCNSAKVNVKRDYREILQTQDTHHAVWTLDKTIAKLETELSAARTLQESFLNGSPVSEGHKGSDSTGRQKYLMVIGINTAFSSRQRRDSIRNTWMPQGIKRRKLEEEKGIVIRFVIGHSAISGGIVERAIKAEERKHGDFMRIDHVEGYLELSGKTKTYFATAVSLWDADFYVKVDDDVHVNIATLGQILSNHVKKPRVYIGCMKSGPVLSDKDVRYYEPEHWKFGDQYFRHATGQLYAISKDLATYISINK

SEQ ID NO: 176 - protein, 655 aa, Oryza sativa
MPPPPRKRLGRAALLLAAAAYLAFLLLFELPSLDLFPSSDAAAGAAMPTHRPRRRELEASSSSSAFASPVLRRPATAVSPAPASAAAAAAGALPIFSSLLLLPRPNATATPFDGTAAEAFAAARPHLDHLRTAAAAAAEEASSSSTAPTCPTSISVHADGLPGDGVRTVELPCGLAVGSHVTVVARPRAARPEYDPKIAERKSGQEPLMVSQFMVELVGTKAVDGEAPPRILHFNPRIRGDYSGKPVIEMNSCYRMQWGQSQRCEGYASRPADETVDGQLKCEKWIRDDDKKSEESKMKWWVKRLIGRPKDVHISWPYPFAEGKLFVLTLTAGLEGYHVNVDGRHVTSFPYRTGYTLEDATGLSLNGDIDIESIFASSLPNSHPSFAPERYLEMSEQWRAPPLPTEPVELFIGILSAASHFAERMAVRKSWMMYTRKSTNIVARFFVALNGKKEVNAELKREAEFFQDIVIVPFMDSYDLVVLKTIAIAEYGVRVIPAKYIMKCDDDTFVRIDSVLDQVKKVRSDKSVYVGSMNYFHRPLRSGKWAVTYEEWPEEAYPNYANGPGYVISADIARYIVSEFDNQTLRLFKMEDVNMGMWVEKFNNTLRPVEYRHDVRFYQSGCFDGYFTAHYQSPQHMICLWRKLQSGSSRCCNVR

SEQ ID NO: 177 - protein, 447 aa, Oryza sativa
MVSQFMVELVGTKAVDGEAPPRILHFNPRIRGDYSGKPVIEMNSCYRMQWGQSQRCEGYASRPADETVDGQLKCEKWIRDDDKKSEESKMKWWVKRLIGRPKDVHISWPYPFAEGKLFVLTLTAGLEGYHVNVDGRHVTSFPYRTGYTLEDATGLSLNGDIDIESIFASSLPNSHPSFAPERYLEMSEQWRAPPLPTEPVELFIGILSAASHFAERMAVRKSWMMYTRKSTNIVARFFVALNGKKEVNAELKREAEFFQDIVIVPFMDSYDLVVLKTIAIAEYGVRVIPAKYIMKCDDDTFVRIDSVLDQVKKVRSDKSVYVGSMNYFHRPLRSGKWAVTYEEWPEEAYPNYANGPGYVISADIARYIVSEFDNQTLRLFKMEDVNMGMWVEKFNNTLRPVEYRHDVRFYQSGCFDGYFTAHYQSPQHMICLWRKLQSGSSRCCNVR

SEQ ID NO: 178 - protein, 334 aa, Oryza sativa
MKTASSSSSSSHGFPATASLCTPYLLLVPLGLLAVVLVVPSLGSSHVRSDGLGVLCHAGPSTADGYLVTPGGDAASAAAAAAETKAVVRPELRLLVGVLTTPKRYERRNIVRLAYALQPAVPPGVAQVDVRFVFCRVADPVDAQLVVLEAARHGDILVLNCTENMNDGKTHEYLSSVPRMFASSPYDYVMKTDDDTYLRVAALVDELRHKPRDDVYLGYGFAVGDDPMQFMHGMGYVVSWDVATWVSTNEDILRYNDTHGPEDLLVGKWLNIGRRGKNRYSLRPRMYDLNWDMDNFRPDTVLVHMLKDNRRWAAAFRYFNVTAGLQPSNLYHFP

SEQ ID NO: 179 - protein, 313 aa, Oryza sativa
MAMKAPASSNSYLLLAPLALLLLAAVVFLLPSLNGARVGSDGGLGVLCARRSAGAEDYTVAAPAAPKEEEKPELSLLVGVLTMPKRYERRDIVRLAYALQPAAARARVDVRFVFCRVADPVDAQLVALEAARHGDVVVLGGCEENMNHGKTHAYLSSVPRLFASSPYDYVMKTDDDTYLRVAALADELRGKPRDDVYLGYGYAMGGQPMPFMHGMGYVVSWDVATWVSTAEEILARNDTEGPEDLMVGKWLNLAGRGRNRYDLKPRMYDLSWDMDNFRPDTVAVHMLKDNRRWAAAFSYFNVTAGINLHHLSP

SEQ ID NO: 180 - protein, 264 aa, Oryza sativa
MALSSLVVLSVSGCLSAPRSRPVVDNTNNDGGLGAETTAAREPEFRLLVGVLTTPSRYERRGILRLAYALQPAPGAQVDVRFVLCDVTDAADAVLVAAEAARHGDILVLDGCSTENMNDGKTHAYLSSVPRLFAPCPYDYVMKADDDTYLRVAALADELRGKPRRTSTSAGATPSATTRCRSCTAWATSCPGTSRAGCPPTRTSGRNRYNLKPRMYDINWDMDEFRPNTIAVHRLKNNRRWAAVFRHFNVTVGIKPSTAARPHN

SEQ ID NO: 181 - protein, 239 aa, Oryza sativa
MCNQCLQGPYPLHTQALPQSYLDMSTVWQSSPLPNEPVDIFIGILSSGNHFAERMGVRKTWMSAVRNSPNVVARFFVALVHVVSARYVMKCDDDTFVRLDSIITEVNKVQSGRGLYIGNINFHHRSLRHGKWAVTYEEWPEEVYPPYANGPGYVISSDIAGAIVSEFRDRKLRVLSYSFLSGSATDWDESDGRRAAFVQVRSSVVAPRRQFNACWDWHLPDADDSGCVPAPDPSLILGK

SEQ ID NO: 182 - protein, 658 aa, Oryza sativa
MKRARSSEVFLGGRGRARRRVAPLLAAVAFVYLLFVSFKLSGLAGIADPAAVTRPASGGAGEVVMPRRLEDPAPRARGDGDGVAVAGYGRITGEILRRRWEAGGRGRRRWGRGGNFSELERMADEAWELGGKAWEEACAFTGDVDSILSRDGGGETKCPASINIGGGDGETVAFLPCGLAVGSAVTVVGTARAARAEYVEALERRGEGNGTVMVAQFAVELRGLRAVEGEEPPRILHLNPRLRGDWSHRPVLEMNTCFRMQWGKAHRCDGNPSKDDDQVDGLIKCEKWDRRDSVDSKETKTGSWLNRFIGRAKKPEMRWPYPFSEGKMFVLTIQAGIEGYHVSVGGRHVASFPHRMGFSLEDATGLAVTGGVDVHSIYATSLPKVHPSFSLQQVLEMSDRWKARPVPEEPIQVFIGIISATNHFAERMAIRKSWMQFPAIQLGNVVARFFVALSHRKEINAALKTEADYFGDVVILPFIDRYELVVLKTVAICEFGVQNVTAEYIMKCDDDTFVRLDVVLKQISVYNRTMPLYMGNLNLLHRPLRHGKWAVTYEEWPEFVYPPYANGPGYVISIDIARDIVSRHANHSLRLFKMEDVSMGMWVEDFNTTAPVQYIHSWRFCQFGCVHNYFTAHYQSPWQMLCLWNKLSSGRAHCCNYR

SEQ ID NO: 183 - protein, 174 aa, Oryza sativa
MSPLSLSFPSTLLPLSFFAWMWMALRLRRDREEGRRGRRLAGEERCGEEGRCDGRRHRCLLSRGWPRRSSPSTVGLDAAQQSAPVHTPLHAPPRRGQAARRYSTDPVLVRPDDHARWEQGAEVTAVAVVVVLVEFDHAKTYYIGAPSESVEQDVMHSYSMAFGGGGFAISYPAA

SEQ ID NO: 184 - protein, 148 aa, Oryza sativa
MVHLYPAAVPPHELQTPLRTFRAWSGSPAGPFTVNTRPEATPNATALPCHRKPIMFYLDRVTAMSTSTTNWTLTEYVPEVLSGERCNTTGFDAATKVQMIQVIALKMNPAIWKRAPRRQCCKMQNANEGDKLIVKIHECKPDEATTSV

SEQ ID NO: 185 - protein, 293 aa, Oryza sativa
MATGGRRGRAVPLSKSFSRRLRHGRTGFGGSGHARGMMQLHVASAPSRCRRCWPTGGEETDGARWERRSGGRRYGGSDDGDDAGAGEQGGGGGGEMSMVRYWRRSSVGAGSGSTAVDGGHGIASRPNAGASAGIARPRAISPTAVMNCNAPRAEGQCGGDGVTDGCHRGGSGEAAEEGEIEDDGAVSAGVAQQSMEMPMRTFLNWYRCADYTAYVFNTRPLACQPCQMPQVYYMRQSRLDRRRNTTVTEYERHRVAPVNCGWRIPDLATLLDRVIVLKKPDPDLWKRVIKHTP

SEQ ID NO: 186 - protein, 173 aa, Oryza sativa
MSACPVSLYFFPLFSPFPFSLSLFSLGALGRPAPPADGWGGDRRCEVGEEVRRPATWRRRRRGSRGTRRQRRRDVHGEVSWGFAVVVTRTFLNWYRCADYTAYAFNTWPVACQPCQTPQVYYMQQSRLDRRRNTTVTVYERRRVVPAKCGWRIRDPAALLDRVIVLKKPDPDL

SEQ ID NO: 187 - protein, 483 aa, Oryza sativa
MSKLQDRHGGEAAADVGRRARHQRLLLSFPVFPIVLLLLAPCTIFFFTSGDVPLPRIRIEYARRDAPTITAVAADTSPPPPSPPSSSPPPLSFPPPPPPPSSPPPPALPVVDDHSDTQRSLRRLRQLTDSPYTLGPAVTGYDARRAEWLRDHTEFPASVGRGRPRVLMVTGSAPRRCKDPEGDHLLLRALKNKVDYCRVHGFDIFYSNTVLDAEMSGFWTKLPLLRALMLAHPETELLWWVDSDVVFTDMLFEPPWGRYRRHNLVIHGWDGAVYGAKTWLGLNAGSFIIRNCQWSLDLLDAWAPMGPPGPVRDMYGKIFAETLTNRPPYEADDQSALVFLLVTQRHRWGAKVFLENSYNLHGFWADIVDRYEEMRRQWRHPGLGDDRWPLITHFVGCKPCGGDDASYDGERCRRGMDRAFNFADDQILELYGFAHESLDTMAVRRVRNDTGRPLDADNQELGRLLHPTFKARKKKTSRAARPM

SEQ ID NO: 188 - protein, 448 aa, Oryza sativa
MEKHGGKVTSDRRAGRRQHGQRCSASDAAPLVVVVILIVAALFLILGPTGSSSFTVPRIRVVFNEPVHVAVAAPPPPPPPAQMQAGANASSEEDSGLPPPRQLTDPPYSLGRTILGYDARRSAWLAAHPEFPARVAPAGRPRVLVVTGSAPARCPDPDGDHLLLRAFKNKVDYCRIHGLDVFYNTAFLDAEMSGFWAKLPLLRMLMVAHPEAELIWWVDSDAVFTDMLFEIPWERYAVHNLVLHGWEAKVFDEKSWIGVNTGSFLIRNCQWSLDLLDAWAPMGPRGPVRDRYGELFAEELSGRPPFEADDQSALIYLLVTQRQRWGDKVFIESSYDLNGFWEGIVDKYEELRRAGRDDGRWPFVTHFVGCKPCRRYADSYPAERCRRGMERAFNFADDQILKLYGFAHESLNTTAVRRVRNETGEPLDAGDEELGRLLHPTFRAARPT

SEQ ID NO: 189 - protein, 463 aa, Oryza sativa
MAVTGGGRPAVRQQAARGKQMQRTFNNVKITLICGFITLLVLRGTVGINLLTYGVGGGGGSDAVAAAEEARVVEDIERILREIRSDTDDDDDDEEEEPLGVDASTTTTTNSTTTTATAARRRSSNHTYTLGPKVTRWNAKRRQWLSRNPGFPSRDARGKPRILLVTGSQPAPCDDAAGDHYLLKATKNKIDYCRIHGIEIVHSMAHLDRELAGYWAKLPLLRRLMLSHPEVEWVWWMDSDALFTDMAFELPLARYDTSNLVIHGYPELLFAKRSWIALNTGSFLLRNCQWSLELLDAWAPMGPKGRVRDEAGKVLTASLTGRPAFEADDQSALIHILLTQKERWMEKVYVEDKYFLHGFWAGLVDKYEEMMERHHPGLGDERWPFVTHFVGCKPCGGYGDYPRERCLGGMERAFNFADNQVLRLYGFRHRSLASARVRRVANRTDNPLVNKEAALKMDAKIES

SEQ ID NO: 190 - protein, 601 aa, Oryza sativa
MGSAGGGGWDDDDDGDEQCATPPPPRSFSPMMMTEAGMKLVTPPWRRWRRWRGGCAESGRAVRAACVAAAVVLAVVVLSYYARWGGDQDEMPTSLFTTRGSEGATSANLTDDQLLGGLLTAAFSPQSCRSRYEFAGYHKRKPPHKPSPYLVAKLRSHEALQKRCGPGTAPYDKALRQLKSGDGAAAADGDDDCRYLVSISYNRGLGNRIIAIVSAFLYAVLTERALLVAPYNGDVAALFCEPFPGTTWLLPDGGRRFPLLHLRDLDGKSKESLGALLKSNGIVSVAAGVNGSTSSSWSGRPPPPYVYLHLDGGADYHDKLFYCDEQQRLLRGVPWLLMKTDSYLVPGLFLVPSLRGELERMFPEKDAVFHHLSRYLLHPANAVWHAITAYHRDHLAGAGHLVGIQIRVYHEETPPVSQVVLDQVLSCARRENLLPAAGNTSSSDQAVLVTSLSSWYYEKIRDELGGGGGGVHQPSHEGLQRMGDTAHDMRALSEMYLLSTCDALLTTGFSTFGYVAQGLAGLRPWIMPRRPWWEKEAATAVPDPPCARVATPEPCFHSPSYYECAARRNYDDIGKVVPYVRRCEDVSWGIQLVNGSSQSQW

SEQ ID NO: 191 - protein, 392 aa, Oryza sativa
MEASLDQLPDQLSRGLEDAPPSNSNLTGDQLLGDLLSAAFSWQSCRSRHEALQVRCGPGTAPYEKALRQPKSGDGAIAADGDDDDCRYVVSIVYDRGLGNRVIPIISAFLYAVLTERALLVAPYNGDVDALFCEPFPGTTWIHPGGRRFPLRRLRDLDGKSRESLGTLLKSNAVSVDAGGNGTSSWSGRPPPYVYLHLDGGADYHDKLFYCDEQQRLLRGTPWLLMKTDSYLVPGLFLVPSLRGELERMFPEKDAVFHHLSRYLLHPANAVWHAITAYHRDHLAGAGHLVGIQIRVYHEETPPVSQVVLDQVLSCARREKLIPFPTAGTTTNTSSSDQAVLVTSLNSWYSDRIRDELGGGGGVHQPSHEGWQRMGDTAHDMRALSEMYLLST

SEQ ID NO: 192 - protein, 384 aa, Oryza sativa
MRTTTRRRCDDCCSRLPTPLAKMLAWSVYGLPKWNFTNHINQRAKSQKLPYNMISGAGATCRGRGLDDEAEVEARDVVERLDAAEEGRVWGRDGGAVEHGGVDLDLLILGAAGGVEAHPRGRHRRPLLTVERRGSREEGGEKVSNQITPPFSSPSSLLPYLICEQFPGSTWTLPEGDFPFSGIRGFNACTRESLGNALRRGNALPETHYRHGCTCTCSTTYFNRNGNEPRFFCDDGLDALWRVDWMVLLSDNYFVLGLFLVSRIERVLPRMFPCHDAAFHLLGRYLLHPRNVRTSCPVCSRSSTLPLPESSRAARPGRRKPVLVVSLHGAYSERIKDLYYEQDIAGRESMSVFQPTHLDRQQSGEKLHNQEEEEEYDKWGQGYF

SEQ ID NO: 193 - protein, 507 aa, Oryza sativa
MKSSKVQLHRAAAAASPSHGAPEDTPETSTRHDDDRLLGGLLSPAFDEHSCRSRYTSSLYRRRSPFRPSTYLVERLRRYEARHKRCGPGSALFQEAVEHLRSGRNAARSECQYVVWTPFNGLGNRMLALASTFLYALLTDRVLLVHAPPEFDGLFCEPFPGSSWTLPADFLITDFDGVFTMWSPTSYKNMRQAGTISNATAEQSLPAYVFLDLIQSFTDAAFCDDDQQVLAKFNWMVIKSDVYFAAMLFLMPAYERELTQLFPEKEAVFHHLARYLFHPSNDVWGIVHRFYEAYLARADELVGLQVRVFPEMPIPFDNMYEQIIRCSEQEGLLPKLGQTVVVTAANGSSVVAPSTKLTSILVTSLFPDYYDRIRGVYHARPTETGEYVAVHQPSHEREQRTEARGHNQRALAEIYLLSFCDRVVTSAVSTFGYIAHGLAGVRPWVLLRPPSPVARAEPACVRSETVEPCLQALPRRMCGAAEGSDIGALVPHIRHCEDVQKGIKLFS

SEQ ID NO: 194 - protein, 121 aa, Oryza sativa
MCPLSLSPPSSSFSLLATPAFSLPWQAARAGAAAGGDGGERRRRGSGGGRHWIGDGGLGNRILAAASAFLYAVLTARVLLVDTSNEMDELFSEPFPGTAWLLLRDFPLVLMRKTHTGLEGS

SEQ ID NO: 195 - protein, 586 aa, Oryza sativa
MSPSIRMAPAPSSSLATAGHGKTKSGRSSSSAVRPALLAIAVSVMVVLLMAVLFGARWTPSGGHGGGADTSWVSAGARVVLNAVSSQQGADPVVKVAQPHDRLLGGLLSPDFNDTSCLSRYRASLYRRRSLHVLSSHLVSALRRYESLHRLCGPGTSAYERAVARLRSPSSSNTTSDAPSECRYLVWTPHAGLGNRMLSITSAFLYALLTGRVLLFHRSGDDMKDLFCEPFPGATWVLPEKDFPIRGMERFGIRTRESLGNALGRGEGGRDPPPPWMYVHLRHDYTRPGASDRLFFCDDGQDALRRVGWVVLLSDNYFVPGLFLIPRYERELSRMFPRRDAVFHHLGRYLFHPSNTVWGMVMRYHGSYLAKAEERVGVQVRTFSWAPISTDELYGQIVSCAQGENILPRVRESSSGSDNATAIPGSGRQQQQRPARRKAVLVVSLHGEYYERIRDMYYEHGAAGGDAVSVFQPTHLGGQRSEERMHNQKALAEMMLLSFSDVALTSAASTFGYVSHGLAGLRPWVLMVPVRKKAPNPPCRLAATVEPCFHTPPHYDCQARTKGDNGKTVRHVRHCEDLKDGVQLVD

SEQ ID NO: 196 - protein, 582 aa, Oryza sativa
MSPRVRMSVARWLPSSPAHGKTKSRRSSSAVRPTLLVIAVTVIAVLLVAVVFGGAGRWTLSGGGDTSWVSAGARVVINAVSGQQRDGDDPVAAAVEPRNDRLLGGLLSPDFDDSSCLSRYRAGLYRRQSPHAVSPHLVASLRRYESIHRRCGPGTSAYERAVERLRSPPPSNTSDAECRYLVWTPLEGLGNRMLTLTSAFLYALLTDRVLLFHHPAGEGLRDLFCEPFPGSTWTLPEGDFPFSGMQGFNARTRESLGNALRRGEGAAKDHPPPPPPWMYVHLRHDYNRNANDPRFFCDDGQDALRRVGWVVLLSDNYFVPGLFLVPRFERALSRMLPRRDAAFHHLGRYLLHPSNTVWGMVARYHASYMACANERVGIQVRSFYWARISTDELYGQIMSCAHGENILPRVTQQGPNFTAAGDQPQPAARPGRRKAVLVVSLHGAYSERIKDLYYEHGAAGGESVSVFQPTHLDRQRSGEQLHNQKALAEMMLLSFSDVVVTSAASTFGYVGHGLAGLRPWVLMSPLDKKVPDPPCRLAATIEPCFHNPPNYDCRTRAKGDTGKIVRHIRHCEDFENGVQLVD

SEQ ID NO: 197 - protein, 565 aa, Oryza sativa
MATRGKKLGGVAGGGGAAVRVVGVVCVMAVPLFALLVLGGWASASTVWQSAARLTAVTAGFTNASKPSATGDAATGADELFGGLLAAGGCFDRGACLSRHESPRYYKSSPFSPSPYLLQKLRDYEARHRRCGPGTPGYAKSDEQLRSGHSSEVMECNYLVGLPYNGLGNRMLSLVASFLYALLTDRVFLVHFPDDFADHFCEPFPGGEGETATTWVLPPDFPVADLWRLGVHSNQSYGNLLAAKKITGDPARETPVSVPPYVYLHLAHDLRGDDERFYCNDDQLVLAKVNWLLLQSDLYFVPSLYAIPEFQDELRWMFPEKESVTHLLARYLLHPSNSVWGMVMRYHHAYLAPAAEMIGVQIRMFSWASIPVDDMYKQVMACSSQERILPDTDGGDAPAPARTNTSGGGATTAILVASLQVEYYERLKGKYYEHAATASGGGRRWVGVFQPSHEEKQEMGKRAHNQKALAEIYLLSFADVLLTSGMSTFGYMSSALAGLRPAMLLTAFNHKVPRTPCVRAVSMEPCFHKPPPAAATCQGKLAVSENVTRHIKRCEDLAGGIKLFD

SEQ ID NO: 198 - protein, 548 aa, Oryza sativa
MDTDKLGEAAAAHPPEAEKRRGVAAPGAATVLVLVALPLMLVSYFFGDLAADTVVRLHRFKESSLSSSSPAAAADRLLGGLLSPEFDEASCLSRYEASSRWKPSPFRVSPYLVERLRRYEANHRRCGPGTARYRDAVARLRSGDGDGDAECRYVVWLPIQGLGNRMLSLVSTFLYALLTGRVVLVHEPPEMEGLFCEPFPGTSWLLPPDFPYKGGFSAASNESYVNMLKNGVVRHDGDGGALPPYVYLHLEQIHLRLQNHTFCEEDHRVLDRFNWMVLRSDSYFAVALFLVPAYRAELDRMFPAKGSVFHHLGRYLFHPGNRAWGIVERFYDGYLAGADERLGIQVRIVPQMAVPFDVMYEQILRCTREHGLLPQVTSTSESAGGRPPPPPTATATKVKAVLVVSLKREYYDKLHGAYYTNATASGEVVAVYQPSHDGDQHTEARAHNERALAEIYLLSFSDAVVTTAWSTFGYVAHALAGVRPWQLAPLDWGKMRADVACARPASVEPCLHSPPPLVCRARRDRDPAAHLPFLRHCEDVPAGLKLFD

SEQ ID NO: 199 - protein, 596 aa, Oryza sativa
MEMSGAGAGGVPTKLEHDDAAAVAAEREPCGGGAPRREEKERWRRVLVVGCLVALLLFAFFVLGRESASEVLQIASSKLSAMNGGFTTKNPSHGGGAAKHADELLGGLLAPGMDRRSCRSRYQAAHYYKHFPYAPSPHLLDKLRAYEARHRRCAPGTPLYNRSVEQLRSGRSAGGVECNYVVWLPFDGLGNRMLSMVSGFLYALLTDRVLLVDLPHDSSDLFCEPFPGATWLLPPDFPVANLFGLGPRPEQSYTTLLNKKKITAVVNNDDDPASKNATAALPPPPAYVYLSLGYQMADKLFFCGDDQRALAKVNWLLLYSDLYFVPSLYSVAEFNGELRRLFPAKESACHLLARYLLHPTNAVWGMVTRYYNSYLAQASRRIGVQIRMFNFASIPVDDLYNQILTCSRQEHVLPETTTDNDNDDDLATAYDSNSSNGSGGGNYSAILIASLYPDYYERIRATYYEHATRGRVRVGVFQPTHEERQATQRLFHNQKALAEILLLGFSDELVTSGMSTFGYVGSSLAGVRPTILMPAHGHRVPAPPCRRAVSMEPCNLTPPRVGEAECREMAAVVDKEDVARHVKVCEDFDRGVKFFD

SEQ ID NO: 200 - protein, 552 aa, Oryza sativa
MDSKPTRPHRRPPPLPSKTSGVWPVALLVVLCFAALPLFLALSRARPTLSDVSQMGVTVTVHDEDPAGTPPESSPANRDRLLGGLLSPDIGESACLSRYKSSLHRKPSPHSPSPYLVSRLRKYEALHRKCGPGTLFYKKSLMQLTSAYSMGLVECTYLVWTPCGGSHLGDRMLSMASAFLYALLTHRVFVVHVTDDMAGLFCEPFPAASWELPAGFLVHNLTQLGRGSEHSYANLLGAKKIKTDDPAGVRSESLPSYAYVHLEHDYQQSDQLFFCDDDQTVLAKVNWLILRSNLYFTPGLFLVPQFEDELRWMFPARDTVFHHIGRYLFHPSNKVWELITRYHTSYMAKFEENIGIQITTFAGSKVSSEEYFKQIVACTSQEKILPEIDPNATSSANEAALATTASKAVLVSSAQPSEYAEKLKAMYYEHATVTGEPVSVLQPAGAGKQAPNQKALVEMFLQSYCDVSVVSGRSTVGYVGHGLAGVKPWLLLTPTNRTASANPPCIQTTSMEPCFHAPPSYDCRAKKDGDLGAVLRHVRHCEDVGDGLKLYD

SEQ ID NO: 201 - protein, 315 aa, Oryza sativa
MAEVGVIPVLPEPGPTTISAPRHTAADARGAPETESYNRAVQRLKDGSGKGSATEADARCGCSRATSRWCRSYANFSADSAESYGNMMKNKVLGTDGSDGDMPAAQMPAFAYLHLNHDYGDDDKMFFCDDDQRLVMRTDTYIVPSLFLVTTFQDELDALFPERGAVFHYLGRYLFPQANHTAVLQRVPRAGVAAAGRRPDCGSQALFCSSAAAAEDDTLTCAKPWRDILQILMSWLSINYFLESYVSLNRAKAALKGSYNPRGQEGWIWRSIESSLNQVAKEPKRRMGKDTGCARRGNRSRRCMEIRGGEGGEGD

SEQ ID NO: 202 - protein, 647 aa, Oryza sativa
MGNALKDAGRVEEAINCYRSCLALQANHPQALTNLGNIYMEWNLISAAASFYKAAISVTSGLSSPLNNLAVIYKQQGNYADAITCYTEVLRVDPTAADALVNRGNTFKEIGRVNEAIQDYIQAATIRPTMAEAHANLASAYKDSGHVETAIVSYKQALRLRPDFPEATCNLLHTLQCVCDWENRNAMFRDVEEIIRKQIKMSVLPSVQPFHAIAYPIDPMLALEISCKYAAHCSLIASRFGLPSFVHPPPVPVKAEGKHCRLRVGYVSSDFGNHPLSHLMGSVFGMHDRDNVEVFCYALSQNDGTEWRQRIQSEAEHFVDVSAMTSDMIARIINQDKIQILINLNGYTKGARNEIFALQPAPIQVSYMGFPGTTGAAYIDYLVTDEFVSPTCYSHIYSEKLVHLPHCYFVNDYKQKNRDCLDPVCPHKRSDYGLPEDKFIFACFNQLYKMDPEIFDTWCNILKRVPNSALWLLRFPAAGETRVRAHAAARGVRPDQIIFTDVAMKNEHIRRSSLADLFLDTPLCNAHTTGTDILWAGLPMITLPLEKMATRVAGSLCLATGLGEEMIVSSMKEYEDRAVDLALNPAKLQALTNKLKEVRMTCPLFDTARWVRNLERAYYKMWNLYCSGRHREPFKVIEDDNEFPYDR

SEQ ID NO: 203 - protein, 184 aa, Oryza sativa
MATPGPDELLKSHHILAKRREIRKREMEGVVVFADENSILRTELFDEVQKVKSVGAMPVGVLGEDEGTNEMFLQAPPGCLPLTAGCYASSPVIASGEPEFAPAPFCRCPSDPRPPPPPSPSIRSLLPRADGDGYQEGNTWLSSSLCRIESLESLSTPLKNENDDSIFSLPTNIAVWAYDEGLLW

SEQ ID NO: 204 - protein, 549 aa, Oryza sativa
MDSEERSKKRLRLWSRAVVHFSLCFAIGVFAALLPLAATGATSIDSIRASFRPTVAATPPVPELDLLLIVTVTRPDDDDDDGMSQEASLTRLGHTLRLVEPPLLWIVVGAENTTATARAVNALRGTRVMFRHLTYAAENFTGPAGDEVDYQMNVALSHIQLHRLPGVVHFAAASSVYDLRFFQQLRQTRGIAAWPIATVSSADQTVKLEGPTCNSSQITGWYSKDSSSNITETTWDSSSNTTQTTWDSSSNKTQTTTLAALDTNASKQNSSSGPPEINMHAVGFKSSMLWDSERFTRRDNSSTGINQDLIQAVRQMMINDEDKKRGIPSDCSDSQIMLWHLDMPRHTPKIEQATPEKESLTKGDEEESHDMTLDNVVPKTEEHETLEKENLMKGDEKGSHDMMLDNVVAKIEEQETPEKENLTKGEEKESHDMMLDNVVAKIEEQETPEKENLTKGDEKESHDMMLDNVVAKIDEQETTEKESLTKGDEKESHDMMLDNVVAKIEEQETPEKESLTKGDEKETHDMMLDNVVAKIEEQETPEEGKTKEG

SEQ ID NO: 205 - protein, 381 aa, Oryza sativa
MASIRRPHSPAKQQHLLRHGHLGPFASSSPPSSPLRHSSSSSSPRSAAHHHHHLLAAAGHTSFRRPLPRFAAFFLLGSFLGLLHFLSHLPRPLGPIPNPNSHHRHRDPFPILQHPHPPSTPHSNHKLLIVVTPTRARPSQAYYLTRMAHTLRLLHDSPLLWIVVQAGNPTPEAAAALRRTAVLHRYVGCCHNINASAPDFRPHQINAALDIVDNHRLDGVLYFADEEGVYSLHLFHHLRQIRRFATWPVPEISQHTNEVVLQGPVCKQGQVVGWHTTHDGNKLRRFHLAMSGFAFNSTMLWDPKLRSHLAWNSIRHPEMVKESLQGSAFVEQLVEDESQMEGIPADCSQIMNWHVPFGSESVVYPKGWRVATDLDVIIPLK

SEQ ID NO: 206 - protein, 267 aa, Oryza sativa
MGDEEEKGSRSRRMLIVVTTTRSDGGVRQRRNAALAHVEKHRLFSVVHFAHASGVYDAYFFDEIRQIERCHGRSPPPGASLASCVCVVVVEGNDPAAVGSQEIAVPYRYTRYSSTCSRRKLGHGDVEEDEAEPSSPVGRHHIRARDWVSGRRETPPQPRRETAAVLLSSSSSPIHLPRRDDAAAAIPNPHVCSVRACYATRAAASNSLPITGSIGLGDWEQFDVDHVHRASSELSMVAWSFTLPHHAGQCLVAQGLSAGLVLMHARL

SEQ ID NO: 207 - protein, 268 aa, Oryza sativa
MGAAAGSDERQMRPVVYVPSLFLVRARQSLWSAVAATGDRQRGGSNVDDRRLGEEARGVEGKEMGRPASRARRPASRAGMPARRLASSAAGEEAAGARRCHADAGWRNTEIQPASMESNVDLRCQQTGAPAGECTSTSSLRGWYRLYSRSMDVCKLVVNDGFGPALPSGGALPERDVYDTDQYMLALIYHTRMRRYECLTGERMARKKIRDAWSKLSPPPPDLSDTHDTRRHRSRRAPSPSPASKLPPPPPLPPRPGGLVPSSAARLA

SEQ ID NO: 208 - protein, 422 aa, Oryza sativa
MGTRPCAGVASAVAAAVAVLLLAVSCFAAAATTTQKHGRMSGKGGDVLEDDPTGKLKVFVYEMPRKYNLNLLAKDSRCLQHMFAAEIFMHQFLLSSPVRTLDPEEADWFYTPAYTTCDLTPQGFPLPFRAPRIMRSAVRYVAATWPYWNRTDGADHFFLAPHDFGACFHYQEERAIERGILPVLRRATLVQTFGQRHHPCLQPGSITVPPYADPRKMEAHRISPATPRSIFVYFRGLFYDMGNDPEGGYYARGARASVWENFKDNPLFDISTEHPATYYEDMQRAIFCLCPLGWAPWSPRLVEAVVFGCIPVIIADDIVLPFADAIPWGEISVFVAEEDVPRLDTILASVPLDEVIRKQRLLASPAMKQAVLFHQPARPGDAFHQILNGLARKLPHPKGVFLEPGEKGIDWDQGLENDLKPW

SEQ ID NO: 209 - protein, 389 aa, Oryza sativa
MDVDVDCAGKGGDVLEDDPTGKLKVFVYEMPRKYNLNLLAKDSRCLQHMFAAEIFMHQFLLSSPVRTLDPEEADWFYTPAYTTCDLTPQGFPLPFRAPRIMRSAVRYVAATWPYWNRTDGADHFFLAPHDFGACFHYQEERAIERGILPVLRRATLVQTFGQRHHPCLQPGSITVPPYADPRKMEAHRISPATPRSIFVYFRGLFYDMGNDPEGGYYARGARASVWENFKDNPLFDISTEHPATYYEDMQRAIFCLCPLGWAPWSPRLVEAVVFGCIPVIIADDIVLPFADAIPWGEISVFVAEEDVPRLDTILASVPLDEVIRKQRLLASPAMKQAVLFHQPARPGDAFHQILNGLARKLPHPKGVFLEPGEKGIDWDQGLENDLKPW

SEQ ID NO: 210 - protein, 434 aa, Oryza sativa
MVGARAGRVPAAAAAAAAVLIVAACVFSSLAGAAAAAEVVGGAAQGNTERISGSAGDVLEDNPVGRLKVFVYDLPSKYNKRIVAKDPRCLNHMFAAEIFMHRFLLSSAVRTLNPEQADWFYAPVYTTCDLTHAGLPLPFKSPRMMRSAIQFLSRKWPFWNRTDGADHFFVVPHDFGACFHYQEEKAIERGILPLLRRATLVQTFGQKNHVCLKEGSITIPPYAPPQKMQAHLIPPDTPRSIFVYFRGLFYDNGNDPEGGYYARGARASLWENFKNNPLFDISTEHPATYYEDMQRSVFCLCPLGWAPWSPRLVEAVVFGCIPVIIADDIVLPFADAIPWDEIGVFVDEEDVPRLDSILTSIPIDDILRKQRLLANPSMKQAMLFPQPAQPRDAFHQILNGLARKLPHPDSVYLKPGEKHLNWTAGPVADLKPWK

SEQ ID NO: 211 - protein, 504 aa, Oryza sativa
MRFSVVISSWILNRQLIKSAPKGGGRQQRRAKGMEKVAVGLLPPLRFIAVLAVVSWTSFIYCHFSLLSGGLLLGHGGGDDGADPCRGRYIYVHDLPRRFNDDILRDCRKTRDHWPDMCGFVSNAGLGRPLVDRADGVLTGEAGWYGTHQFALDAIFHNRMKQYECLTNQSAVADAVFVPFYAGFDFVRYHWGYDNATRDAASVDLTQWLMRRPEWRRMGGRDHFLVAGRTGWDFRRDTNINPNWGTNLLVMPGGRDMSVLVLESSLLNGSDYAVPYPTYFHPRSDADVFRWQDRVRGMQRRWLMAFVGAPRPDDPKNIRAQIIAQCNATSACSQLGCAFGSSQCHSPGNIMRLFQKATFCLQPPGDSYTRRSVFDSMVAGCIPVFFHNATAYLQYAWHLPREHAKYSVFISEHDVRAGNVSIEATLRAIPAATVERMREEVIRLIPSVIYADPRSKLETVRDAFDVAVEGIIDRIAMTRGGYARSWLRPKQSRQALDARRRRLS

SEQ ID NO: 212 - protein, 471 aa, Oryza sativa
MEKVAVGLLPPLRFIAVLAVVSWTSFIYCHFSLLSGGLLLGHGGGDDGADPCRGRYIYVHDLPRRFNDDILRDCRKTRDHWPDMCGFVSNAGLGRPLVDRADGVLTGEAGWYGTHQFALDAIFHNRMKQYECLTNQSAVADAVFVPFYAGFDFVRYHWGYDNATRDAASVDLTQWLMRRPEWRRMGGRDHFLVAGRTGWDFRRDTNINPNWGTNLLVMPGGRDMSVLVLESSLLNGSDYAVPYPTYFHPRSDADVFRWQDRVRGMQRRWLMAFVGAPRPDDPKNIRAQIIAQCNATSACSQLGCAFGSSQCHSPGNIMRLFQKATFCLQPPGDSYTRRSVFDSMVAGCIPVFFHNATAYLQYAWHLPREHAKYSVFISEHDVRAGNVSIEATLRAIPAATVERMREEVIRLIPSVIYADPRSKLETVRDAFDVAVEGIIDRIAMTRGGYARSWLRPKQSRQALDARRRRLS

SEQ ID NO: 213 - protein, 517 aa, Oryza sativa
MERTGAHGGKRLLPRLLFLAALSVTPWLLIFCLHFSVFDGAPPVSSPAARQSLVAVVSEGGEDSQRFLLEQEEQLRRLPSARDVTTTTAAAVAGDAHACEGRYVYIHDLPPRFNDDILRNCREWYQWINMCVYLSNGGLGEPVDNADGAFADEGWYATDHFGLDVIFHSRIKQYECLTDDSSRAAAVFVPFYAGFDVVQHLWGSNASVKDAASLELVDWLTRRPEWRSMGGRDHFVMSGRTAWDHQRQTDSDSEWGNKFLRLPAVQNMTVLFVEKTPWTEHDFAVPYPTYFHPAKDAEIFQWQQRMRGMKREWLFTFAGGTRPGDPNSIRHHLIRQCGASSLCNLIQCRKGEKKCLIPSTFMRVFQGTRFCLQPPGDTYTRRSAFDAMLAGCVPVFFHPASAYTQYKWHLPDVHETYSVFIAEEDIRSGNVSVEETLRRIPPDVAEKMTETVISLVPRLLYADPRSKLETVKDAVDLTVEAVIERVKKLRKEMHGAGASSRLSTALGANTNGGFQSS

SEQ ID NO: 214 - protein, 261 aa, Oryza sativa
MYELPPRFNAEIVRDCRLYSRSMDVCKLVMNDGFGPAALPSGGALPERDVYDTDQYMLALIYHARMRRYECLTGESMARKKTRDARSKLAPPPPDLSDTTLAAIGADVRPRLLPHRSRRCRFLPHLAPGASSPAAPPGLPEKRREERKECKCALLGEEGIEINVGVEVVIDGVLNEGVDVLAIPEEGREKEGDNEGGDWGSGERHATARKEQLEEEGSVGRGLKLREALNDNMRRSIIYHLLTANLMLVNLIISSIWLVGS

SEQ ID NO: 215 - protein, 420 aa, Oryza sativa
MGSRTVGWWLLAAAVVLAAAAADSGEAERAAEQHSERISGSAGDVLEDNPVGRLKVFIYDLPRKYNKKMVNKDPRCLNHMFAAEIFMHRFLLSSAVRTLNPKEADWFYTPVYTTCDLTPAGLPLPFKSPRVMRSAIQYISHKWPFWNRTDGADHFFVVPHDFGACFHYQEEKAIERGILPLLQRATLVQTFGQENHVCLKEGSITIPPYAPPQKMQAHLIPPDTPRSIFVYFRGLFYDTGNDPEGGYYARGARASLWENFKNNPLFDISTDHPPTYYEDMQRAVFCLCPLGWAPWSPRLVEAVVFGCIPVIIADDIVLPFADAIPWEEIGVFVEEKDVPKLDTILTSMPIDDILRKQRLLANPSMKQAMLFPQPAQPRDAFHQILNGLARKLPHPEGVYLQPSDKRLNWTAGPVGDLKAW

SEQ ID NO: 216 - protein, 128 aa, Oryza sativa
MAAVAAATCDDTVGECDVDDEEEVEEMALMGAAGAAAGETGCRTLQRRLLDYLAARPEWRRSGGRDHVVLAHHPNGMLDARYKLWPCVFVLCDFGRYPPSVVGLDKDVIAPYRHVVPNFAGQRLRRLR

SEQ ID NO: 217 - protein, 342 aa, Oryza sativa
MERSFRVFVYPDGDPGTFYQTPRKLTGKYASEGYFFQNIRESRFRTDDLEKAHLFFVPISPHKMRGKVPSSLLLVTYAWLILHIRSYDRSILFLDLYWWCPLCSSFRGHWGVGADHFFVTCHDVGVRAFEGLPFIIKNSIRVVCSPSYNAGYIPHKDVALPQILQPFALPAGGNDIENRTILGFWAGHRNSKIRVILARIWENDTELAISNNRINRAIGNLVYQKHFFRTKFCVCPGGSQVNSARISDSIHYGCMPVILSDYYDLRFSGILNWRKFAVVLKESDVYELKSILKSLSQKEFVSLHKSLVQVQKHFEWHSPPVPYDAFHMIMYELWLRHHVIKY

SEQ ID NO: 218 - protein, 477 aa, Oryza sativa
MASKNSCACHGVVVTLASCLLLVAAAVSVSVLAAHVAVGRVWSPAGAAAAAGHHHSLSPAWVPSPSSRHAHHARELVNRRVQVGRMEAGLVQARVSIRRASRTRSCTPDDGGGFIPRGAVYRDAYAFHQSYIEMEKRFKVWTYREGEPPVVQKGGAAFAGNDGIEGHLIAELDSSGGGGRHRARHPGEAHAFFLPISVASIAGYVYRRDMIDFWDPQLRLVAGYVDGLAAMYPFWNRSRGADHFLVSCHQWAPILSAAKAELRGNAIRVMCDADMSDGFDPATDVALPPVVASARATPPQGRVASERTVLAFFAAGGGGGGAVREALLARWEGRDDRVVVYGRLPAGVDHGELMRRARFCLCPCGGGEGAAAASRRVVEAITAGCVPVLVDDGGYSPPFSDVLDWARFSVAVPAERVGEIKDILGGVSDRRYGVLRRRVLRVRRHFRLNRPPAKRFDVVNMVIHSIWLRRLNLSLPY

SEQ ID NO: 219 - protein, 332 aa, Oryza sativa
MRASSFSSLMLPCSHGHGGGRATASTCAAAAAACLALVALVILVVSMDPRAQASSWFFLSSSSSSSSSSSSTLVRPAASSHAASLRKPSSWGGGNGGGGGGEHLLVTSSSFGSGGGARGSWSRNSTSKEVLFQGGGGGGGDEMTSTAAAPTPALIIGSSSGDGVSPSRVAVTAAAAEPTPALAPAPAPEWGVGDAASGDDIIQVMPQAQRRRDVKLELLELGLAKARATIREAIYLECVPVVIGDDYTLPFADVLNWAAFSVRVAVGDIPRLKEILAAVSPRQYIRMQRRVRAVRRHFMVSDGAPRRFDVFHMILHSIWLRRLNVRVIARED

SEQ ID NO: 220 - protein, 417 aa, Oryza sativa
MGTRRRSARARARPPLAMPLAVLLLFACSSGVAAAAAQGIERIKDDPVGKLKVYVYELPPKYNKNIVAKDSRCLSHMFATEIFMHRFLLSSAIRTSNPDEADWFYTPVYTTCDLTPWGHPLTTKSPRMMRSAIKFISKYWPYWNRTEGADHFFVVPHDFAACFYFQEAKAIERGILPVLRRATLVQTFGQKNHACLKDGSITVPPYTPAHKIRAHLVPPETPRSIFVYFRGLFYDTSNDPEGGYYARGARASVWENFKNNPMFDISTDHPQTYYEDMQRAVFCLCPLGWAPWSPRLVEAVVFGCIPVIIADDIVLPFSDAIPWEEIAVFVAEDDVPQLDTILTSIPTEVILRKQAMLAEPSMKQTMLFPQPAEPGDGFHQVMNALARKLPHGRDVFLKPGQKVLNWTEGTREDLKPW

SEQ ID NO: 221 - protein, 401 aa, Oryza sativa
MPLAVLLLFACSSGVAAAAAQGIERIKEDDPVGKLKVYVYELPPKYNKNIVAKDSRCLSHMFATEIFMHRFLLSSAIRTSNPDEADWFYTPVYTTCDLTPWGHPLTTKSPRMMRSAIKFISKYWPYWNRTEGADHFFVVPHDFAACFYFQEAKAIERGILPVLRRATLVQTFGQKNHACLKDGSITVPPYTPAHKIRAHLVPPETPRSIFVYFRGLFYDTSNDPEGGYYARGARASVWENFKNNPMFDISTDHPQTYYEDMQRAVFCLCPLGWAPWSPRLVEAVVFGCIPVIIADDIVLPFSDAIPWEEIAVFVAEDDVPQLDTILTSIPTEVILRKQAMLAEPSMKQTMLFPQPAEPGDGFHQVMNALARKLPHGRDVFLKPGQKVLNWTEGTREDLKPW

SEQ ID NO: 222 - protein, 341 aa, Oryza sativa
MFATEIFMHRFLLSSAIRTSNPDEADWFYTPVYTTCDLTPWGHPLTTKSPRMMRSAIKFISKYWPYWNRTEGADHFFVVPHDFAACFYFQEAKAIERGILPVLRRATLVQTFGQKNHACLKDGSITVPPYTPAHKIRAHLVPPETPRSIFVYFRGLFYDTSNDPEGGYYARGARASVWENFKNNPMFDISTDHPQTYYEDMQRAVFCLCPLGWAPWSPRLVEAVVFGCIPVIIADDIVLPFSDAIPWEEIAVFVAEDDVPQLDTILTSIPTEVILRKQAMLAEPSMKQTMLFPQPAEPGDGFHQVMNALARKLPHGRDVFLKPGQKVLNWTEGTREDLKPW

SEQ ID NO: 223 - protein, 506 aa, Oryza sativa
MAASVVSDKSSGGASLLRPSRVLFLAVLSTAFWSVIFYAHHSAVQGNATMASVLLRPSSFSRPLLTSFRLIGGGLDRCAGRRVYMYELPPRFNAELVRDCRLYSRSMDVCKLVVNDGFGPALPGGGALPERDVYDTDQYMLALIYHARMRRYECLTGDAAAADAVFVPFYAGFDAAMNLMKSDLAARDALPRQLAEWLVRRPEWRAMGGRDHFMVAARPVWDFYRGGDDGWGNALLTYPAIRNTTVLTVEANPWRGIDFGVPFPSHFHPTSDADVLRWQDRMRRRGRRWLWAFAGAPRPGSTKTVRAQIIEQCTASPSCTHFGSSPGHYNSPGRIMELLESAAFCVQPRGDSYTRKSTFDSMLAGCIPVFLHPASAYTQYTWHLPRDYRSYSVFVPHTDVVAGGRNASIEAALRRIPAATVARMREEVIRLIPRITYRDPAATLVTFRDAFDVAVDAVLDRVARRRRAAAEGREYVDVFDGHDSWKHNLLDDGQTQIGPHEFDPYL

SEQ ID NO: 224 - protein, 468 aa, Oryza sativa
MAILSAVFWFLVFSLLSGMPGGGDLSSVLFRPSSLSLPLLNSFTFDQNPSPEQQPPPAPAPAEDRCAGRYIYMYDMPARFNEELLRDCRALRPWTAEGMCRYVANGGMGEPMGGDGGGIFSERGWFDTDQFVLDIIFHGRMKRYGCLTGDPAAAAAVFVPFYGSCDLGRHIFHRNASVKDALSEDLVGWLTRRSEWRAMGGRDHFFVAGRTTWDFRRERDEGWEWGSKLLNYPAVQNMTAILVEASPWSRNNLAVPYPTYFHPETAADVAAWQRRVRAAARPWLFSFAGGPRKGNGTIRADIIRQCGASSRCNLFHCHGAAASGCNAPGAVMRVFESSRFCLEPRGDTMTRRSTFDAILAGCIPVFFHPGSAYTQYTLHLPPERGGWSVLIPHADVTGRNVSIEETLAAISPEKVRSMREEVIRLIPTVVYADTRSSRVDFRDAFDVAVDAVVGRVARRRRDEPDARR

SEQ ID NO: 225 - protein, 591 aa, Oryza sativa
MKRHNAAEVPVPVSYGGERDEKTGSKVDKMGGGAARRWRSGGCCSRLWLVLVVFATVTMLLRHRYDSGLGHGAAAVVRIEPVHRKVKPADRGGARPSFSDSGSAKPVTVDHKSATTDSSTGTESDGGGEPSSASSSLPAAAHPFSRALAAAGDKGDRCGGRYVYVQELPPRFNTDMVKNCVALFPWKDMCKFTANGGFGPPMSGGGGMFQETGWYNSDKYTVDIIFHERMRRYECLTDDPSLAAAVYVPFFAGLEVWRHLWGFNATARDAMALEVVDIITSRPEWRAMGGRDHFFTAGLITWDFRRLADGDAGWGSKLFSLPAIKNMTALVVEASPWHLNDAAIPFPTAFHPASDEAVFVWQDKVRRLERPWLFSFAGAARPGSAKSIRSELITQCRASSACSLMECRDGPSNKCGSAASYMRLFQSSTFCLQPQGDSYTRKSAFDAMLAGCIPVFFHPGTAYVQYTWHLPRNHADYSVYISEDDVRRNASIEERLRRIAPAAVERMRETVISLIPTVVYAQPSSRLDTMKDAFDVAVDAIVDKVTRLRRDIVDGRGEEEKLEMYSWKYPLLREGQKVEDPHEWDSLFAFA

SEQ ID NO: 226 - protein, 620 aa, Oryza sativa
MKRHNTAEVPVPVSYGGKVEKTMGGAKQGRGGGGGCCSRLWFMVVLSATVTLLVRHCYDSGVIGHGAAAGGVVRIEPVHRGLYHTRKASPVDRGGGGGGTSFSGHSPSPPDAGGSAKPESPHDSGVKAPSELTTVEHTKQPSEPASTGTESDDGGKPSSASSSSLPAAAHPFARALAAAGDKGDRCGGRYVYVQELPPRFNTDMVKNCATLFPWTDMCAFTANGGFGPQMSGGDGGVFQETGWYNSDQYTVDIIFHDRIRRYECLTDDPSLAAAVYVPFFAGLEVARHLWGFNVTTRDAMALEVVDIITSRSEWRAMGGRDHFFTAGRTTWDFRRLNDGDAGWGSKLFSLPAIKNMTALVVEASPWHLNDAAIPFPTAFHPASDEAVFVWQDKVRRLERPWLFSFAGAARPGSAKSIRSELIAQCRASSVCSLMECADGPSNKCGSPASYMRLFQSSTFCLQPQGDSYTRKSAFDAMLAGCIPVFFHPGTAYVQYTWHLPRNHADYSVYISEDDVRRNASIEERLRRIAPAAVERMRETVISLIPTVVYAQPSSRLDTMKDAFDVAVDAIVDKVTRLRRDIVDGRGEEEKLEMYSWKYPLLREGQKVEDPHEWDPLFAFG

SEQ ID NO: 227 - protein, 527 aa, Oryza sativa
MEANYPKYVLYGLLIVGSWLLSCLLHFQVFHLSLFPYPSYLLSRRVVLPLALNARFLPPRPDVAGDDDGGIVRRRSSSPAKAAAEASCDGRYVYVLEVPRRFQMLTECVEGPKVFDDPYHVCVVMSNSGLGPVIPPAAAGNATVDGDIIPNTGWYNTDQYALEVIFHNRMRRYECLTSDMAAATAVYVAFYPALELNRHKCGSSATERNEPPREFLRWLTSQPSWAALGGRDHFMVAARTTWMFRRGGAGDSLGCGNGFLSRPESGNMTVLTYESNIWERRDFAVPYPSYFHPSSAREVSAWQATARAARRPWLFAFAGARRANGTLAIRDHIIDECTASPPGRCGMLDCSHGLEGSITCRSPRRLVALFASARFCLQPPGDSFMRRSSIDTVLAGCIPVFFHEASTFKKQYQWHERDADADNDNATVDRRRYSVVIDPDDVVEGRVRIEEVLRRFSDDEVAAMREEVIRMIPRFVYKDPRVRFEGDMRDAFDITFDEIMARMRRIKNGEILGWKLDGDDDVVAKDS

SEQ ID NO: 228 - protein, 105 aa, Oryza sativa
MPLTLFFFLLSFLPLTRVAFFAAGGGAMREVLLTRWEGRDDQVLLYGLLPAGVDHGELMGRARFCLCPTGDDEGAAAASRRVVEAITVGCCAVDSAVSFLRRRHR

SEQ ID NO: 229 - protein, 526 aa, Oryza sativa
MDGSHGSAAALRATGRCLAPLIIPASCVVWVLFFFPSPSPDVAVRRDGFLPAVTLPVQRAGDTPPPPPIIDASPPPPSTSPPPPPPRRGRPARRDRCAGRYVYMHELPSRFNSDLLRDCRTLSEWTDMCRHVANGGIGPRLPPAARGGVLPATGWYDTNQFTLEVIFHARMRRYGCLTADASRAAAVYVPYYPGLDVGRYLWGFSNGVRDLLAEDLAEWLRGTPAWAAHGGRDHFLVGGRIAWDFRREDGGGEGSQWGSRLLLLPEAMNMTALVIEASPWHRRTDVAVPYPTYFHPWRPSDVSSWQRDARRARRPWLFAFAGAGRGNGDDHDRHHGGGVVRDRVIAQCARSRRCGLLRCGARGRRDDCYDPGNVMRLFKSAAFCLQPRGDSYTRRSVFDAILAGCVPVFFHPGSAYTQYRWHLPRDHAAYSVFVPEDGVRNGTVRLEDVLRRVSAARVAAMREQVIRMIPTVVYRDPRAPSARGFTDAIDVAVDGVIERVRRIKQGLPPGGDDDDDHRWDAYFDTQ

SEQ ID NO: 230 - protein, 496 aa, Oryza sativa
MREGNVTHHEYMQVGKGRDVGMNQISSFEAKVANGNGEQTLSRDIYRLGRRFDFYRMLSFYFTTVGFYFSSMVTVLTVYVFLYGRLYLVMSGLERSILLDPRIEQNIKPLENALASQSFFQLGLLLVLPMVMEVGLEKGFRTALGEFVIMQLQLASVFFTFQLGTKTHYYGRTILHGGAKYRPTGRGFVVYHAKFADNYRMYSRSHFVKGLELLILLVVYLVYGSSYRSSSMYLFVTFSIWFLVASWLFAPFIFNPSCFEWQKTVDDWTDWRKWMGNRGGIGMSVDQSWEAWWISEQEHLRKTSIRSLLLEIILSLRFLIYQYGIVYHLNIARRSKSILVYGLSWLVMLSVLVVLKMVSIGRQKFGTDLQLMFRILKGLLFLGFVSVMAVLFVVCNLTISDVFASILGFMPTGWCILLIGQACSPLVKKAMLWDSIMELGRSYENLMGLVLFLPIGLLSWFPFVSEFQTRLLFNQAFSRGLQISRILAGQKDIGEE

SEQ ID NO: 231 - protein, 1224 aa, Oryza sativa
MPMGSRLGASPEMIERNMSLMLLLIVEKTGPFDIYAKEVEKEKASFSHYNILPLNISGQRQPVMEIPEIKAAVDLLRKIDGLPMPRLDPVSAEKETDVPTVRDLFDWLWLTFGFQKGNVENQKEHLILLLANIDMRKGANAYQSDRHNHVMHSDTVRSLMRKIFENYISWCRYLHLESNIKIPNDASTQQPEILYIGLYLLIWGEASNVRFMPECICYIFHHSHQYKNTIIPMCLFMEHVRQDFDPPFRREGSDDAFLQLVIQPIYSVMKQEAAMNKRGRTSHSKWRNYDDLNEYFWSKRCFKQLKWPMDSAADFFAVPLKIKTEEHHDRVITRRRIPKTNFVEVRTFLHLFRSFDRMWAFFILAFQAMVIVAWSPSGLPSAIFDPTVFRNVLTIFITAAFLNFLQATLEIILNWKAWRSLECSQMIRYILKFVVAVAWLIILPTTYMSSIQNSTGLIKFFSSWIGNLQSESIYNFAVALYMLPNIFSALFFIFLPFRRVLERSNSRIIRFFLWWTQPKLYVARGMYEDTCSLLKYTLFWILLLICKLAFSFYVEIYPLVGPTRTIMFLGRGQYAWHEFFPYLQHNLGVVITVWAPIVMVYFMDTQIWYAIFSTICGGVNGAFSRLGEIRTLGMLRSRFEAIPIAFGKHLVPGHDSQPKRHEHEEDKINKFSDIWNAFIHSLREEDLISNRERNLLIVPSSMGDTTVFQWPPFLLASKIPIALDMANSVKKRDEELRKRINQDPYTYYAVVECYQTLFSILDSLIVEQSDKKVVDRIHDRIEDSIRRQSLVKEFRLDELPQLSAKFDKLLNLLLRTDEDIEPIKTQIANLLQDIMEIITQDIMKNGQGILKDENRNNQLFANINLDSVKDKTWKEKCVRLQLLLTTKESAIYVPTNLDARRRITFFANSLFMKMPKAPQPFCFCISVLTPYFKEEVLFSAEDLYKKNEDGISILFYLRKIYPDEWKNFLERIEFQPTDEESLKTKMDEIRPWASYRGQTLTRTVKLEHRRTVESSQQGWASFDMARAIADIKFTYVVSCQVYGMQKTSKDPKDKACYLNILNLMLMYPSLRVAYIDEVEAPAGNGTTEKTYYSVLVKGGEKYDEEIYRIKLPGKPTDIGEGKPENQNHAIVFTRGEALQAIDMNQDNYLEEAFKMRNVLEEFESEKYGKRKPTILGLREHIFTGSVSSLAWFMSNQETSFVTIGQRVLANPLNFYGPSFIDRHH

SEQ ID NO: 232 - protein, 560 aa, Oryza sativa
MCIMQISFVLCSKLMVVLIKGFNSTLRQGNVTHHEYIQLGKGRDVGMNQISNFEAKVANGNGEQTLCRDIYRLGHRFDFYRMLSLYFTTVGFYFNSMVAVLTVYVFLYGRLYLVLSGLEKSILQDPQIKNIKPFENALATQSIFQLGMLLVLPMMIEVGLEKGFGRALGEFVIMQLQLASVFFTFHLGTKTHYYGRTILHGGAKYRGTGRGFVVRHAKFAENYRMYSRSHFVKALELLILLVVYLAYGISYRSSSLYLYVTISIWFLVFCWLFAPFVFNPSCFEWHKTVDDWTDWWHWMSNRGGIGLAPEQSWEAWWISEHDHLRNGTIRSLLLEFVLSLRFLIYQYGIVYHLHIVHGNRSFMVYALSWLVIAIVLVSLKVVSMGREKFITNFQLVFRILKGIVFIVLISLVVILFVVFNLTVSDVGASILAFIPTGWFILQIAQLCGPLFRRLVTEPLCALFCSCCTGGTACKGRCCARFRLRSRDVLRKIGPWDSIQEMARMYEYTMGILIFFPIAVLSWFPFVSEFQTRLLFNQAFSRGLQISRILTGQNGSGSKRD

SEQ ID NO: 233 - protein, 469 aa, Oryza sativa
MFEAKVASGNGEQTLSRDVYRLGHRLDFFRMLSFFYTTIGFYFNTMMVVLTVYAFVWGRFYLALSGLEAFISSNTNSTNNAALGAVLNQQFVIQLGIFTALPMIIENSLEHGFLTAVWDFIKMQLQFASVFYTFSMGTKTHYYGRTILHGGAKYRATGRGFVVEHKKFAENYRLYARSHFIKAIELGVILTLYASYGSSSGNTLVYILLTISSWFLVLSWILAPFIFNPSGLDWLKNFNDFEDFLNWIWFRGGISVKSDQSWEKWWEEETDHLRTTGLFGSILEIILDLRFFFFQYAIVYRLHIAGTSKSILVYLLSWACVLLAFVALVTVAYFRDKYSAKKHIRYRLVQAIIVGATVAAIVLLLEFTKFQFIDTFTSLLAFLPTGWGIISIALVFKPYLRRSEMVWRSVVTLARLYDIMFGVIVMAPVAVLSWLPGLQEMQTRILFNEAFSRGLHISQIITGKKSHGV

SEQ ID NO: 234 - protein, 1592 aa, Oryza sativa
MEVEIVEQRWRPTPTPLPPPPPPLPPPPAASAASSSGAGDAAAVASAANQFDSEKLPQTLVSEIRPFLRVANQIEHESPRVAYLCRFHAFEKAHMMDPRSTGRGVRQFKTALLQRLEQDEKSTFTKRMAKSDSQEIRLFYEKKEKADERELLPVLAEVLRAVQIGTGKEKQKRIASETFADKSALFRYNILPLYPGSTKQPIMLLPEEKKGNVANQREHLILLLANMHARLNPKSSSETMLDDRAVDELLAKTFENYLTWCKFLGRKSNIWLPSVKQEIQQHKLLYISLYLLIWGEASNLRLMPECLCYIFHHESLKNKNGVSDHSTWRNYDDLNEFFWSADCFKLGWPMRLNNDFFFTSNKNKNSRLPIVPPVQQTEQQINQLRTSQQTDQQNTQLRTSQQTEQRNTQLRTPNGSSSFQNMLNPEAPGQTQQQTTSDTSQQKWLGKTNFVEVRSFWHIFRSFDRMWTLLVLGLQFFRDIYLENLQYVSLVVSVKSNAGAILAVWAPIILVYFMDTQIWYSVFCTIFGEMDLMTMPMSLEHRSGSIRWPMFLLAKKFSEAVDMVANFTGKSTRLFCIIKKDNYMLCAINDFYELTKSILRHLVIGDVEKSFSSACPCEYYYDVLQILSRVIAAIYTEIEKSIQNASLLVDFKMDHLPSLVAKFDRLAELLYTNKQELRYEVTILLQDIIDILVQDMLVDAQSVLGLINSSETLISDDDGTFEYYKPELFASISSISNIRFPFPENGPLKEQVKRLYLLLNTKEKVVEVPSNLEARRRISFFATSLFMDMPSAPKVSNEWRNFLERLGPKVTQEEIRYWASFHGQTLSRTVRGMMYYRKALRLQAFLDRTNDQELCKGPAANGRQTKNMHQSLSTELDALADMKFSYVISCQKFGEQKSSGNPHAQDIIDLMTRYPALRVAYIEEKEIIVDNRPHKVYSSVLIKAENNLDQEIYRIKLPGPPLIGEGKPENQNHAIIFTRGEALQTIDMNQDNYLEEAYKMRNVLQEFVRHPRGKAPTILGLREHIFTGSVSSLAGFMSYQETSFVTIGQRFLADPLRVRFHYGHPDIFDRMFHLTRGGISKASKTINLSEDVFAGYNSILRRGHITYNEYIQVGKGRDVGLNQISKFEAKVANGNSEQTLSRDIHRLGRRFDFFRMLSCYFTTVGFYFNSLISVVGVYVFLYGQLYLVLSGLQRALLIEAETQNMKSLETALVSQSFLQLGLLTGLPMVMELGLEKGFRVALSDFILMQLQLASVFFTFSLGTKAHYYGRTILHGGAKYRPTGRKFVAFHASFTENYQLYSRSHFVKGFELVFLLIIYHIFRRSYVSTVVHVMITYSTWFMAVTWLFAPFLFNPAGFAWRKIVEDWADWTIWMRNQGGIGVQPEKSWESWWNAENAHLRHSVLSSRILEVLLSLRFFMYQYGLVYHLKISQDNKNFLVYLLSWVVIIAIVGLVKLVNCASRRLSSKHQLVFRLIKLLIFLSVMTSLILLSCLCQLSIMDLIICCLAFIPTGWGLLLIVQVLRPKIEYYAIWEPIQVIAHAYDYGMGSLLFFPIAALAWMPVISAIQTRVLFNRAFSRQLQIQPFIAGKTKRR

SEQ ID NO: 235 - protein, 604 aa, Oryza sativa
MNQDNYFEEALKMRNLLEEFYQNHGKHKPSILGVREHVFTGSVSSLASFMSNQETSFVTLGQRVLANPLKVRMHYGHPDVFDRIFHITRGGISKASRVINISEDIYAGFNSTLRLGNITHHEYIQVGKGRDVGLNQIALFEGKVAGGNGEQVLSRDIYRLGQLFDFFRMLSFYVTTIGFYFCTMLTVWTVYIFLYGKTYLALSGVGESIQNRVDILQNTALNAALNTQFLFQIGVFTAIPMILGFILEFGVLTAFVSFITMQFQLCSVFFTFSLGTRTHYFGRTILHGGAKYRATGRGFVVRHIKFAENYRLYSRSHFVKGLEVALLLVIFLAYGFNNGGAVGYILLSISSWFMAVSWLFAPYIFNPSGFEWQKVVEDFRDWTNWLFYRGGIGVKGEESWEAWWDEELAHIHNVGGRILETVLSLRFFIFQYGVVYHMDASESSKALLIYWISWAVLGGLFVLLLVFGLNPKAMVHFQLFLRLIKSIALLMVLAGLVVAVVFTSLSVKDVFAAILAFVPTGWGVLSIAVAWKPIVKKLGLWKTVRSLARLYDAGTGMIIFVPIAIFSWFPFISTFQTRLLFNQAFSRGLEISLILAGNNPNAGV

SEQ ID NO: 236 - protein, 553 aa, Oryza sativa
MNQDNYFEEALKMRNLLEEFYQNHGKHKPSILGVREHVFTGSVSSLASFMSNQETSFVTLGQRVLANPLKVRMHYGHPDVFDRIFHITRGGISKASRVINISEDIYAGFNSTLRLGNITHHEYIQVGKGRDVGLNQIALFEGKVAGGNGEQVLSRDIYRLGQLFDFFRMLSFYVTTIGFYFCTMLTVWTVYIFLYGKTYLALSGVGESIQNRVDILQNTALNAALNTQFLFQIGVFTAIPMILGFILEFGVLTAFVSFITMQFQLCSVFFTFSLGTRTHYFGRTILHGGAKYRATGRGFVVRHIKFAENYRLYSRSHFVKGLEVALLLVIFLAYGFNNGGAVGYILLSISSWFMAVSWLFAPYIFNPSGFEWQKVVEDFRDWTNWLFYRGGIGVKGEESWEAWWDEELAHIHNVGGRILETVLSLRFFIFQYGVVYHMDASESSKALLIYWISWAVLGGLFVLLLVFGLNPKAMVHFQLFLRLIKSIALLMVLAGLVVAVVFTSLSVKDVFAAILAFVPTGWGVLSVSFYRNINVHLRQDGAKVNSVLKIVPA

SEQ ID NO: 237 - protein, 263 aa, Oryza sativa
MTFLHAAMVLIMYHKWYLGLVIFSAAVSIKMNVLLFAPSLLLLMLKAMSIKGVFFALLGAAALQVLLGMPFLLSHPVEYISRAFNLGRVFIHFWSVNFKFVPEKFFVSKELAVALLVLHLTTLLVFAHYKWLKHEGGLFHFLHSRFKDATSIGQLIFAKPKLSTLNKEHIVTVMFVGNFIGIVCARSLHYQFYSWYFYSLPFLLWKTRFPTFVRVILFLAVELCWNIYPSTAYSSLLLLFIHISILFGLWSSPAEYPYANGKK

SEQ ID NO: 238 - protein, 194 aa, Oryza sativa
MTFLHAAMVLIMYHKWYLGLVIFSAAVSIKMNVLLFAPSLLLLMLKAMSIKGVFFALLGAAALQVLLGMPFLLSHPVEYISRAFNLGRVFIHFWSVNFKFVPEKFFVSKELAVALLVLHLTTLLVFAHYKWLKHEGGLFHFLHSRFKDATSIGQLIFAKPKLSTLNKEHIVTVMFVGNFIGIVCARSLHYQFYS

SEQ ID NO: 239 - protein, 194 aa, Oryza sativa; identical to SEQ ID NO: 238

SEQ ID NO: 240 - protein, 603 aa, Oryza sativa
MKAAARERKPRHSNGRAAAAAAKNLSKVEPGRHLAVVRLFPACLLALLICLCVVKFFSSLSSQSQRIGTRSRMVSSWEGSASTNVPRIPVAPLIMGRVDEDISTRSPELGVVIVFVLAVSRVVTFLVETCKGLGFCHWKPLSYPMLILKGKQGSVFKNENFKNGTDSENKSRSERQVAISTENDPPPGKEESLTKSPQTAVSESEVPKPKSKISCDDKSKDEGFPYARPIVCHLSGDVRVSPATSSVTLTMPLQQGEAAARRIRPYARRDDFLLPLVREVAITSAASEGDAPSCNVSHGVPAVIFSIGGYTGNFFHDMADVLVPLYLTTFHFKGKVQLFVANYKQWWIQKYKPVLRRLSHRAVVDFDSDGDVHCFDHVIVGLVRDRDLILGQHPTRNPKGYTMVDFTRFLRHAYGLRRDKPMVLGETSGKKPRMLIISRRRTRKLLNLRQVAAMARELGFEVVVSEAGVGGGSGGVKRFASAVNSCDVLVGVHGAGLTNQAFLPRGGVVVQIVPWGRMEWMATNFYGAPAAAMELRYVEYHVAAEESSLARRYPREHAVFRDPMAIHGQGWKALADIVMTQDVKLNLRRFRPTLLRVLDLLQD

SEQ ID NO: 241 - protein, 518 aa, Oryza sativa
MGGDHGKLMKSLKGAAQKYLGVGFLLGFFLVLLTYFTVSEQFAIAAPNAIRKTSPGHASPTIPPPVEEKRPQLPPIIEQRQAPKAEHEHAAVVQEKTPSAEEIEIQKETEEDHTKEKPTDDVTTTVEESAPAKKPACDIQGPWASDVCSIDGDVRIHGAAHDVVIPPPIEGGGSNPNPREWRVVPYSRKHMGGLKEVAVREVASAAEAPACDVRSPVPALVFAMGGLTGNYWHDFSDVLIPLYLQARRFDGEVQLVVENIQMWYVGKYKRVLDRLSRHDIVDMDRDDKVRCFPGAVVGIRMHKEFSIDPARDPTGHSMPEFTKFLRDTFSLPRDAPVSLVDNAAAVRPRLMIISRRHPRKLMNVEEVVRAAERIGFEVVIGDPPFNVDVGEFAKEVNRADVLMGVHGAGLTNSVFLPTGAVLIQVVPYGKMEHIGKVDFGDPAEDMRLKYMAYSAGVEESTLVETLGRDHPAVRDPESVHRSGWGKVAEYYLGKQDIRLDLARFEPLLRDAMDYLKHQ

SEQ ID NO: 242 - protein, 482 aa, Oryza sativa
MGSEVKPAKLGLRRHLNAGFFAGFLLVLLTYVIVSQQFAMETPTAVTSRAPRIDENESVTKARVETEKKREQEWQRPKDTSGAVSAEEFSKRDSTNAKPIENGKVVCGSNGFYSDTCDVDGDVRINGTALSVTLVPASRRSERRREWKIQPYPRRTVSGIAEVTVTRQQDRAAAPACTVTHGVPGVVFALGGLTGNYWHDFSDVLVPLFVASRRYGGEVQFLVSNIQPWWLGKYEAVVRRLSRYDAVDLDRDTEVRCFRRVAVGLRMHKEFSVKPELAPGGQRLTMADFAAFLRDTYALPRAAAAGARRPRLVVIRRAHYRKIVNMDEVVRAAEAAGFEAAVMSPRFDEPVEEVARKVNAFDAMVGVHGAGLTNAVFLPAGAVVIQVVPYGRLERMARADFGEPVADMGLRYMEYSVAADESTLLEMLGPEHQVVKDPEAVHRSGWDKVAEYYLGKQDVRINVARFAATLAAAFDHLRPSHS

SEQ ID NO: 243 - protein, 673 aa, Oryza sativa
MEGGGKAGYSYGGHHHHQDAKLLKNLSRVEPRRFGLGLVAGFLIVTCAYFSTAKFDAIHIAMISSPAKNAAGFMNASSDGSNQQQLDLDRDAMSREGSKAQVLDTDGDDKISSLGPDLGHNASALEGKKKDETFAKDSGDASVSASTDEALAKDDDAIVGAVLPPLSSEEPTNITQDSVLEDEELKVQETAPATTNPSPEKSSNNGSSPSVVPSDPATLPVQQIPPTQEAKDPPAQQIPAVPEAKVPPVQQIPTFPVVKTDSEAAPRRKEWKPLCDLWSNRRIDWCELDGDVRVAGANGTVSLVAPPGPADERTFRAESWHIKPYPRKADPNAMRHVRVLTVQSLPAPAASAAAPACTERHDVPGLVFSDRGYTGNYFHAYTDVILPLFLTARQYSGEVKLLVSDFQMWWLGKFLPVFKAVSNYDLINLDDDRRVHCFRHVQVGLTCHADFSIDPSRAPNGYSMVDFTRFMRATYRLPRDAPFPASGEQQPRRPWRPRLLVIARARTRRFVNADEIVRGAERAGFEVVVSEGEHEVAPFAELANTCDAMVGVHGAGLTNMVFLPTGGVVIQVVPLGGLEFVAGYFRGPSRDMGLRYLEYRITPEESTLIDQYPRDHPIFTDPDGVKSKGWNSLKEAYLDKQDVRLDMKRFRPILKKAIAHLRKNSGNNNTTHN

SEQ ID NO: 244 - protein, 673 aa, Oryza sativa; identical to SEQ ID NO: 243

SEQ ID NO: 245 - protein, 673 aa, Oryza sativa; identical to SEQ ID NO: 243

SEQ ID NO: 246 - protein, 673 aa, Oryza sativa; identical to SEQ ID NO: 243

SEQ ID NO: 247 - protein, 671 aa, Oryza sativa
MEGGGKAGYSYGGHHHHQDAKLLKNLSRVEPRRFGLGLVAGFLIVTCAYFSTAKFDAIHIAMISSPAKNAAGFMNASSDGSNQQQLDLDRDAMSREGSKAQVLDTDGDDKISSLGPDLGHNASALEGKKKDETFAKDSGDASVSASTDEALAKDDDAIVGAVLPPLSSEEPTNITQDSVLEDEELKVQETAPATTNPSPEKSSNNGSSPSVVPSDPATLPVQQIPPTQEAKDPPAQQIPAVPEAKVPPVQQIPTFPVVKTEAAPRRKEWKPLCDLWSNRRIDWCELDGDVRVAGANGTVSLVAPPGPADERTFRAESWHIKPYPRKADPNAMRHVRVLTVQSLPAPAASAAAPACTERHDVPGLVFSDRGYTGNYFHAYTDVILPLFLTARQYSGEVKLLVSDFQMWWLGKFLPVFKAVSNYDLINLDDDRRVHCFRHVQVGLTCHADFSIDPSRAPNGYSMVDFTRFMRATYRLPRDAPFPASGEQQPRRPWRPRLLVIARARTRRFVNADEIVRGAERAGFEVVVSEGEHEVAPFAELANTCDAMVGVHGAGLTNMVFLPTGGVVIQVVPLGGLEFVAGYFRGPSRDMGLRYLEYRITPEESTLIDQYPRDHPIFTDPDGVKSKGWNSLKEAYLDKQDVRLDMKRFRPILKKAIAHLRKNSGNNNTTHN

SEQ ID NO: 248 - protein, 671 aa, Oryza sativa; identical to SEQ ID NO: 247

SEQ ID NO: 249 - protein, 554 aa, Oryza sativa
MGSPKMAKSAMKQGIWRRRIGAPFAAVLVAAVLAVVVFSGQFAKGPNASSQFAPVQVDNTLRPTRDKPVSADQDLERTVSSKLEGEDTEQIRLEDGQSPNKEAAIEEQKPSQAAAIDQDDNTLNPGLKQASGDERSAGGSDSLSKESPPQSQEGDGGTAESGAEPYIKCTAQSDIKICDLSNPRFDICELCGDARTIGQSSTVVYVPQNRASNGEEWIIRAQSRKHLPWIKKVTIKSVNSSEPEPICTSKHHIPAIVFALGGLTANVWHDFSDVLVPLFLTARQFNRDVQLIITNNQPWFIKKYSAIFSRLTRHEIIDFDSDGQIRCYPHVIVGLRSHRDLGIDPSSSPQNYTMVDFRLFVREAYGLPAAEVDIPYKADKDDPDKKPRIMLIDRGKSRRFVNVAHVVQGLDWFGFEVVKADPKIDSNLDEFVRLVDSCDAIMGVHGAGLTNMVFLRSGGVVVHIVPYGIKFMADGFYGAPARDMGLRHVEYSISPEESTLLEKYGWNHTVINDPETIRKGGWEKVAEFYMSKQDIVLNMTRFGPSLLNAIEFIM

SEQ ID NO: 250 - protein, 550 aa, Oryza sativa
MRRGESKAATRGANRSSSSSSWKSRYIGYGLVLGFVLVLLYLMVNAQFSNSPNAYLGPATTSKTESIPATTYQGNQAWQEDGSRGLEEGHREEVASTHTERSTGQRQEKDDESEKQRTEKNSIEEQLGNDRSSNYWEEGRQSEKKDTIEFSEFGGGTDDFNNVANTKPICDTSFGKYDICVLDGDTRAQGGGGAGAAVVTLVSPRAAPREWKIKPYSRKYLDGLKPVTVRSVPNPEDAPPCTTRLNVPAMVIELGGLTGNYWHDFTDVLVPLFIGARRFGGEVQLLVVNLLPFWVDKYRRIFSQISRHDIVDLEKDDDRGVVRCYPHVVVGYGSRKEFTIDPSLDDTGGGYTMVNFTEFLRQSYSLPRDRPIKLGTNHGARPRMMILERTNSRKLMNLPEVAAAARAAGFEVTVAGGRPTSTYDEFAREVNSYDVMVGVHGAGLTNCVFLPTGAVLLQIVPYGRLESIAQTDFGEPARDMGLRYIEYDIAADESSLMDVFGKDHPMIKDPVAVHLSGWGNVAEWYLGKQDVRVNIERFRPFLTQALEHLQ

SEQ ID NO: 251 - protein, 549 aa, Oryza sativa
MRRGESKAATRGANRSSSSSSWKSRYIGYGLVLGFVLVLLYLMVNAQFSNSPNAYLGPATTSKTESIPATTYQGNQAWQDGSRGLEEGHREEVASTHTERSTGQRQEKDDESEKQRTEKNSIEEQLGNDRSSNYWEEGRQSEKKDTIEFSEFGGGTDDFNNVANTKPICDTSFGKYDICVLDGDTRAQGGGGAGAAVVTLVSPRAAPREWKIKPYSRKYLDGLKPVTVRSVPNPEDAPPCTTRLNVPAMVIELGGLTGNYWHDFTDVLVPLFIGARRFGGEVQLLVVNLLPFWVDKYRRIFSQISRHDIVDLEKDDDRGVVRCYPHVVVGYGSRKEFTIDPSLDDTGGGYTMVNFTEFLRQSYSLPRDRPIKLGTNHGARPRMMILERTNSRKLMNLPEVAAAARAAGFEVTVAGGRPTSTYDEFAREVNSYDVMVGVHGAGLTNCVFLPTGAVLLQIVPYGRLESIAQTDFGEPARDMGLRYIEYDIAADESSLMDVFGKDHPMIKDPVAVHLSGWGNVAEWYLGKQDVRVNIERFRPFLTQALEHLQ

SEQ ID NO: 252 - protein, 164 aa, Oryza sativa
MKAAVGNKKSKGTFCAFCHPSLLLLIVAIQFLMIYSPTLDQYMVMLTTDEFIPEPHLRCDFSDNKSDVYEMEGAIRILSRELEVFLVAPRLASISGRSGVNTTGLDANATRWKIQPYTHKGESRVMPSITEVTLRLVTVDEAPPCDEWHDVPVIVYSNGGYCSN

SEQ ID NO: 253 - protein, 526 aa, Oryza sativa
MKGRHERIKKGWSGSAAVWLLLVPLFVLIVLKTDFLPQVARLGDTSFTKVADEMVQKVSSLGLDRARWQQQQTLDVAKLEDSVVGTSDELTGHVDANNEDSNQPNQQILAMSRSKDSRLINSDVAAAKTSHLSCNFSSAHMDTCAMDGDIRIHGRSGVVYVVASSDYRPENATAVIRPYPRKWEQATMERVRQITIRSTAPPGAAVADTDGGGAIIPLRCTVARDMPAVVFSTGGYSVNFFHTMNDILLPLYITAREHGGRVQLLAANYDRRWTAKYQHALAALSMYPVVDLDADAAVRCFPSARVGVESHRVLGIDTPLTGSNGYTMVGFLAFLRSAYSLPRHAVTRTTPRRPRVVMVLRRKSRALTNEAEVVAAVAEAGFEVVAAGPEEAGDVAGFAATVNSCDVMVGVHGAGLTNMVFLPRNGTVVQIIPWGGMKWPCWYDYGEPVPAMGLRYVEYEVAANETTLRERYPMDHPVFADPVSIHRKGFNHLWSTFLNGQNLTLDVNRFKAVMAEVYTSITAAPV

SEQ ID NO: 254 - protein, 465 aa, Oryza sativa
MKAAVRSKKSKGSFCHPPLLLLIVAIQFLVIYSPTLDQYMVMLTTGKPGFPSMLIDGRRSFKQVDEFIPEPHLRCDFRDNRSDVCEMEGAIRILGRTSEVFLVAPSLASISGGGGGVNATGVDANATRWKIQPYTRKGESRVMPGITEVTVRLVTADEAPPCDEWHDVPAIVYSNGGYCGNYYHDFNDNIIPLFITSRHLAGEVQLLVTQKQRWWFGKYREIVEGLTKYEPVDLDAEQRVRCYRRATVGLHSHKDLSIDPRRAPNNYSMVDFKRFLMWRYALPREHAIRMEEEDKSKKPRLLVINRRSRRRFVNLDEIVAAAEGVGFEVAAAELDAHIPAAASAVNSYDAMVAVHGSGLTNLVFLPMNAVVIQVVPLGRMEGLAMDEYGVPPRDMNMRYLQYNITAEESTLSEVYPRAHPVFLDPLPIHKQSWSLVKDIYLGQQDVRLDVRRFRPVLLKALHLLR

SEQ ID NO: 255 - protein, 94 aa, Oryza sativa
MEGAIRILGRELEVFLVAPRLASISGRSGVNTTGLDANATRWKIQPYTHKGESRVMPAITEVTLRLVTVDEAPPCDEWHDVPVIVYSNGGYCSN

SEQ ID NO: 256 - protein, 295 aa, Oryza sativa
MRAALAVLVARRRHHLLRPLEFQHRRLLHGQRRADGPVVPVAPAVPQAAADGERHRGGEDTSVHAQVGGAHHEQGRGGAAPDGSSRHDAPLLVMTAGGYTGNLFHAFSDGFVPAWLTVQHLRRRVVLGVLLYNPWWAGTYGEIISGLLDYHVVDLLHDKRKHCFPGAIIGTRFHGILSVNPARLRDNKTIVDFHDLLADVYETAGDTVVVDVPQPAPRRPRLGIVSCRGKRVIENQAAVARLARTVGFDVDILETADGLQLPASYASVSACDVLVGVHSADLTKLLFLRPGAALV

SEQ ID NO: 257 - protein, 741 aa, Oryza sativa
MASSPRPAATAAAHRRGLIQRPPSAQAYLSAAAALLVLAAVAFSRAGHRFPHPPATRRCRPDAEGSWSAGVFLGDSPFSLEPIEHWGISKADGAAWPVANPVVTCAEVEDAGFPSSFVAKPFLFLQGDAIYMFFETKNPITSQGDIAAAVSEDAGVTWQQLGVVLDEEWHLSYPYVFTYKNKVYMMPESSKNGDIRLYRALDFPLKWELEKVLLEKPLVDSVIINFQGSYWLLGTDLSSYGAKRNREISIWYSNSPLSPWIPHKQNLIHNTGKMLSTRNGGRPFIYNGNLYRVGKGQGGGSGHGIQVFKVEILKSNEYKEVEVPFVINKQLKGRNAWNGARSHHLDVQQLPSGKPWIGVMDGDRVPSGDSVHRLTIGYMIYGVVLILVLVTGGLIGTINCSLPLRWSLPHTEKRSGLFNVEQRFFLYHKLSSLISNLNKLGSLICGRINYRTCKGRVYVVVVMLILVVLTCVGTHYIYGGNGAEEPYPIKGKYSQFTLLTMTYDARLWNLKMFVEHYSNCASVRDIVVVWNKGQPPAQGELKSVVPVRIRVEDRNSLNNRFNIDSEIKTKAVMELDDDIMMTCDDLERGFKVWREHPDRIIGYYPRLSEGSPLEYRNERYARQQGGYNMVLTGAAFMDHGLAFKKYWSKEAEVGRQIVDSFFNCEDILLNFLFANASLTSTVEYVKPAWAIDMSKFSGVAISRNTQAHYHVRSKCLAKFSEIYGNLTAKRFFNSRGDGWDV

SEQ ID NO: 258 - protein, 569 aa, Oryza sativa
MAAAILAMVPSYISRSVAGSYDNEAVAIFALIFTFYLYVKTLNTGSLFYATLNALSYFYMVCSWGGYTFIINLIPIHVLLCIVTGRYSSRLYIAYAPLVILGTLLAALVPVVGFNAVMTSEHFASFLVFIILHVVALVYYIKGLLTPRLFKVAMTLVITVGLAVCFAVIAILIALVASSPTKGWSGRSLSLLDPTYASKYIPIIASVSEHQPPTWPSYFMDINVLAFLIPAGIISCFLPLSDASSFVVLYLVTAVYFSGVMVRLMLVLAPAACILSGIALSEAFDVLTRSVKYQLSKLFDDSPAASGDSSAESSSASTVSTNSAKNETRPEKTETAPKEKPSKKNRKKEKEVAESVPVKPKKEKKLLVLPMEASVLGILLLIVLGGFYVVHCVWAAAEAYSAPSIVLTSRSRDGLHVFDDFREAYAWLSHNTDVDDKVASWWDYGYQTTAMANRTVIVDNNTWNNTHIATVGTAMSSPEKAAWEIFNSLDVKYVLVVFGGLVGYPSDDINKFLWMVRIGGGVFPHIKEPDYLRDGNYRVDAQGTPTMLNCLMYKLCYYRFDKQNSIDNV

SEQ ID NO: 259 - protein, 368 aa, Oryza sativa
MMMGGQQSALNQLVSFLLGVSAAAVLIFFFSSAGGGWSTTTDLSSWANGTVAATAKETNLTSTAAHVEEKANLTNSQAAAAEAAKEEEEKELEKLLAAVADEHKNIIMTSVNEAWAAPGSLLDLFLEGFRAGEGIARFVDHLLIVALDDGAFRRCRDVHPHCYRLAVAGRNFTDEKVFMSEDYLDLVWSKVKLQQRILELGYNFLFTDVDILWFRDPFEQMSMAAHMVTSSDFFVGGAYNPANFPNTGFLYVRSSRRAVGVMEAWRAARASYPGRHEQQVLNEIKRELVERRGVRIQFLDTAHVAGFCSNTRDFATLYTMHANCCVGLGAKLHDLRNLLEEWRAYRRMPDEQRRQGPVRWKVPGICIH

SEQ ID NO: 260 - protein, 369 aa, Oryza sativa
MEIKGNLRRFFVFLFELWLAATLVLVLLCVLANTGGSPEMPAAAEVCNCSQIGIASSRISEEVTGTSGNSNESSFADLAELLPKVATDDRTVIITSVNEAFARPNSLLVLFRESFAAGEKIAHLLDHVLVVAVDPAAFHHCRAVHPHCYHLKVDTMNLSSANNFMSEAYVELVWTKLSLQQRVLELGYNFLFTDVDILWFRDPFRHIGVYADMTTSCDVFNGDGDDLSNWPNTGFYHVKSTNRTVEMLRRWRAARARYPPNHEQNIFNYIKHELAAGLGVRVRFLDTAVFGGFCQLFRNDMARACTMHANCCVGLGNKLHDLRSALDQWANYTSPAPPEGRKKKSGGGGGDRRAGWSVPAKCGTPDKRG

SEQ ID NO: 261 - protein, 260 aa, Oryza sativa
MYFPPGLLALGNMSGHYYHHLTSFLLGAVLPTVLLFFLASDRVSERLPTISSLGNGALVIGGRATAREGGDLTGVDGSAPAPAEKEKFPGLAELLPEVAMEDKTVIITSVNDAWAAPGSLLDLFRDSFHNGDGIAHLLDHVLVVAVDAGGFRRCKAVHPHCYLLDVPGHGGLRRLLRVPPRRRQGVHGARQLLRRAGEQGARPQERARRLEELHGRPDVAGEEGCQQVQVDVPGQVQGVVETALTMKSGNGQRLIILYIG

SEQ ID NO: 262 - protein, 372 aa, Oryza sativa
MGLGLGGGGGMAMINRNHVVSFLAGAALPTLLLFFLASDRVSEKLAIVSSWGSGGSSSAAAADHDLRGAGGDAAPPPAQQEKFPGLPELLPKVAMEDRTVIITSVNEAWAAPGSLLDLYRDSFKNGEGIAHLLDHVLVVAVDPAGFRRCKAVHPHCYLLHVKSINLTSATRFMSREYLELVWTKLSLQQRVLELGYNFLFTDCDMVLFRDPFRHIAVYADMSTSSDDYSAARAPLDNPLNTGLYYVKATSQSVEMLRYWQAARPRFPGAHDQAVFGHIKHELVAKLRARIEPLDTLYFGGFCEYHDDLARAVTMHADCCVGLDTKVHDLTDIAADWKNYTGMSPEERKKGGFKWTYPTRCRNSIGWRKPVHP

SEQ ID NO: 263 - protein, 389 aa, Oryza sativa
MRGSAGMASSKNGLSPVVVFLLGAASATALIVFVFTSTASPAWPTPEATPATRQEKKAAAVACAPRAKGIDSETRRAARTNQTGGGDDDDEFARMVRRAAMEDRTVIMTSVNEAWAAPGSLMDSFLESFRVGENISHFVEHIVVVAMDEGALRRCRAIHPHCYLLLPEVAGLDLSGAKSYMTKDYLDLVWSKLKLQQRASMIVGETRGVDDEEHDARWHWQDVDLAWFRNPMVHITAAADITTSSDFYFGDPDDLGNYPNTGFIYFKATPRNARAMAYWHAARRRFPGEHDQFVFNEIKRELAAGAGEGGGVGVRIRFIDTAAVSGFCQLGRDLNRIATVHMTCCIGLENKLHDLRNVIRDWRRYVARPRWERQMGKIGWTFEGGKCIH

SEQ ID NO: 264 - protein, 267 aa, Oryza sativa
MANGTVILTTLNSAWAEPGSVVDVFLESFRIGDETRWLLDHLVMVSLDLTAHRRCLQIHRHCFALTTDDGFDFSGEKNFMTDGYLKMMWRRIDFLGHVLAKGYSFIFTDTDIVWFRNPLPHLHHDGDFQIACDHFTGDPDDLSNSPNGGFAYVRSTSATAAFYRYWYAARERHPGLHDQDVLNLIKRDAYVARLGVRIRFLSTDLFAGLCEHGRNLSTVCTMHANCCVGLRRKVDDLGLMLQDWRRFMATPGSDRHSVTWSVPRNCR

SEQ ID NO: 265 - protein, 408 aa, Oryza sativa
MAPKVAVTEATGRQAASFVLGCVATLTVMLLFQYQAPPDYGRAARSPVQFSTSRDQLLLHCGGNGTAPPPPVIARGGEEANITGKPPTTATAVAEEQPPTKPPATSTASSPTHHIPATSTDLEEEGGEFRGLAAAVARAATDDRTVIITCVNHAFAAPDSLLDIFLQGFRVGDGTPELLRHVLVVAMDPTALTRCRAVHPHCYLYTMPGLDVDFTSEKFFASKDYLELVWSKLKLQRRILQLGYNFLFTDVDIVWLRNPFKHVAVYADMAISSDVFFGDPDNIDNFPNTGFFYVKPSARTIAMTKEWHEARSSHPGLNEQPVFNHIKKKLVKKLKLKVQYLDTAYIGGFCSYGKDLSKICTMHANCCIGLQSKISDLKGVLADWKNYTRLPPWAKPNARWTVPGKCIH

SEQ ID NO: 266 - protein, 343 aa, Oryza sativa
MACKVRGDMGKLIPVISFFLGAALTAAFVIATMDINWRLSALASWNNNDSPPAVTDEMKALSELTEVLRNASMDDRTVIMTSINRAYAAPGSLLDLFLESFRLGEGTEPLLKHVLIVAMDPAALARCRQVHPHCYLLRRPEGAVDYSDEKRFMSKDYLDMMWGRNLFQQTILQLGFNFLFTDIDIMWFRNPLRHIAITSDIAVANDYYNGDPESLRNRPNGGFLYVRAARRTVDFYRRWRDARRRFPPGTNEQHVLERAQAELSRRADVRMQFLDTAHCGGFCQLSRDMARVCTLHANCCTGLANKVHDLAAVLRDWRNYTAAPPAARRRGGFGWTTPGKCIR

SEQ ID NO: 267 - protein, 417 aa, Oryza sativa
MRRWVLAIAILAAAVCFFLGAQAQEVRQGHQTERISGSAGDVLEDDPVGRLKVYVYDLPSKYNKKLLKKDPRCLNHMFAAEIFMHRFLLSSAVRTFNPEEADWFYTPVYTTCDLTPSGLPLPFKSPRMMRSAIELIATNWPYWNRSEGADHFFVTPHDFGACFHYQEEKAIGRGILPLLQRATLVQTFGQKNHVCLKDGSITIPPYAPPQKMQAHLIPPDTPRSIFVYFRGLFYDTSNDPEGGYYARGARASVWENFKNNPLFDISTDHPPTYYEDMQRSVFCLCPLGWAPWSPRLVEAVVFGCIPVIIADDIVLPFADAIPWEEIGVFVAEEDVPKLDSILTSIPTDVILRKQRLLANPSMKQAMLFPQPAQAGDAFHQILNGLARKLPHGENVFLKPGERALNWTAGPVGDLKPW

SEQ ID NO: 268 - protein, 417 aa, Oryza sativa; identical to SEQ ID NO: 267

SEQ ID NO: 269 - protein, 417 aa, Oryza sativa; identical to SEQ ID NO: 267
